(19) United States
(12) Patent Application Publication
(10) Pub. No.: US 2010/0254945 A1
(43) Pub. Date: Oct. 7, 2010

(54) Rnai Therapeutic for Respiratory Virus Infection

(75) Inventors: Qing Ge, Rolla, MO (US); Mukesh Kumar, Watertown, MA (US); James Anthony McSwiggen, Bothell, WA (US)

Correspondence Address: Eckman Basu LLP, 2225 E. Bayshore Road, Suite 200, Palo Alto, CA, 94303-3220, US

(73) Assignee: NASTECH PHARMACEUTICAL COMPANY INC., Bothell, WA (US)

(21) Appl. No.: 11/910,971

(22) PCT Filed: Apr. 7, 2006
(86) PCT No.: PCT/US2006/013374

§ 371 Date: Oct. 8, 2007

Related U.S. Application Data
(60) Provisional application No. 60/669,942, filed on Apr. 8, 2005.

(51) Int. Cl. A61K 48/00; A61K 39/145; C07H 21/02; C12N 15/86

(52) U.S. Cl. 424/93.2; 435/456; 536/23.1; 424/209.1

(57) ABSTRACT

Disclosed herein is a double stranded siRNA molecule that inhibits production of a respiratory virus, wherein each strand of said siRNA molecule is about 15 to about 50 nucleotides, and wherein one strand of said siRNA molecule comprises a nucleic acid sequence identical to a conserved site, or a variant thereof, within the nucleic acid sequence of the respiratory virus, and uses thereof.

### SEQUENCE LISTING

[0001] The Sequence Listing for this application-was submitted on compact discs in lieu of a printed paper copy, the discs being recorded on Sep. 1, 2006 and labeled CRF “Copy 1,” “Copy 2,” and “Copy 3,” each disc containing only the 1.68 MB file named “0525PCT.APP,” which is hereby incorporated by reference in its entirety.

### FIELD OF THE INVENTION

[0002] This invention relates generally to the field of treatment and prophylaxis of viral infections. The invention further relates to the field of using RNA interference (RNAi), particularly anti-viral siRNAs and shRNAs.

### BACKGROUND OF THE INVENTION

[0003] RNA interference (RNAi) is a ubiquitous mechanism of gene regulation in plants and animals in which target mRNAs are degraded in a sequence-specific manner (Sharp, P. A., Genes Dev. 15, 485-490 (2001); Hutvagner, G. & Zamore, P. D., Curr. Opin. Genet. Dev. 12, 225-232 (2002); Fire, A., et al., Nature 391, 806-811 (1998); Zamore, P., et al., Cell 101, 25-33 (2000)). The target mRNA can be a host mRNA or an mRNA of a pathogen of the host, such as a viral pathogen.

[0004] Pathogenic viral infections are some of the most widely spread infections worldwide. A family of such viruses is the influenza family. An estimated 20 to 40 million people died during the 1918 influenza A virus pandemic. In the United States between 20 to 40 thousand people die from influenza A virus infection or its complications each year. During epidemics the number of influenza related hospitalizations may reach over 300,000 in a single winter season. There is no superior therapy for influenza virus infection, and existing vaccines are limited in value in part because of the properties of antigenic shift and drift. Treatment or prevention of a number of other viruses that are pathogenic to humans and other animals face similar difficulties.

[0005] The natural RNA degradation process is initiated by the dsRNA-specific endonuclease Dicer, which promotes processive cleavage of long dsRNA precursors into double-stranded fragments between 21 and 25 nucleotides long, termed small interfering RNA (siRNA) (Zamore, P., et al., Cell 101, 25-33 (2000); Elbashir, S. M., et al., Genes Dev. 15, 188-200 (2001); Hammond, S. M., et al., Nature 404, 293-296 (2000); Bernstein, E., et al., Nature 409, 363-366 (2001)). siRNAs are incorporated into a large protein complex that recognizes and cleaves target mRNAs (Nykanen, A., et al., Cell 107, 309-321 (2001). It has been reported by one group that introduction of dsRNA into mammalian cells does not result in efficient Dicer-mediated generation of siRNA and therefore does not induce RNAi (Caplen, N. J., et al., Gene 252, 95-105 (2000); Ui-Tei, K., et al., FEBS Lett. 479, 79-82 (2000)). The requirement for Dicer in maturation of siRNAs in cells can be bypassed by introducing synthetic polynucleotide siRNA duplexes (such as 21 nucleotide sequences), which inhibit expression of transfected and endogenous genes in a variety of mammalian cells (Elbashir, et al., Nature 411: 494-498 (2001)).

### SUMMARY OF THE INVENTION

[0006] These and other objects, advantages, and features of the invention will become apparent to those persons skilled in the art upon reading the details of the invention as more fully described below. Where a range of values is provided, it is understood that each intervening value, to the tenth of the unit of the lower limit unless the context clearly dictates otherwise, between the upper and lower limits of that range is also specifically disclosed. Each smaller range between any stated value or intervening value in a stated range and any other stated or intervening value in that stated range is encompassed within the invention. The upper and lower limits of these smaller ranges may independently be included or excluded in the range, and each range where either, neither or both limits are included in the smaller ranges is also encompassed within the invention, subject to any specifically excluded limit in the stated range. Where the stated range includes one or both of the limits, ranges excluding either or both of those included limits are also included in the invention.

[0007] One aspect of the invention is an RNAi-inducing entity targeted to a transcript of a respiratory virus, wherein said RNAi-inducing entity is between about 15 and about 60 nucleotides in length and comprises: a first nucleic acid sequence that is at least about 84% identical to a portion of a nucleic acid encoding a viral protein; and a second nucleic acid sequence that is at least 84% complementary to the first nucleic acid portion.

[0008] In an embodiment of the invention, the RNAi-inducing entity is between about 15 and about 40 nucleotides in length and comprises: a first nucleic acid sequence that is at least about 89% identical to a portion of a nucleic acid encoding a viral protein; and a second nucleic acid sequence that is at least 89% complementary to the first nucleic acid portion.

[0009] In another embodiment of the invention, the RNAi-inducing entity is between about 15 and about 40 nucleotides in length and comprises: a first nucleic acid sequence that is at least about 94% identical to a portion of a nucleic acid encoding a viral protein; and a second nucleic acid sequence that is at least 94% complementary to the first nucleic acid portion. In another embodiment, the RNAi-inducing entity is an siRNA or an shRNA. In another embodiment of the invention, the nucleic acid comprises a 3′ overhang. In a related embodiment, the 3′ overhang comprises deoxythymidine. In another embodiment of the invention, the viral protein is obtained from a virus selected from the group consisting of human respiratory syncytial virus, human metapneumovirus, human parainfluenza virus 1, human parainfluenza virus 2, human parainfluenza virus 3, human parainfluenza virus 4a, human parainfluenza virus 4b, rhinovirus and influenza virus. In another embodiment of the invention, the viral protein is a respiratory virus protein. In another embodiment of the invention, the viral protein is an influenza virus protein. In another embodiment of the invention, the RNAi-inducing entity is an shRNA and further comprises a third nucleic acid sequence that forms a hairpin loop structure. In a related embodiment, the hairpin loop structure comprises between 4 and 11 nucleotides.

[0010] Another aspect of the invention is an isolated nucleic acid sequence between about 16 and about 35 nucleotides in length that is at least about 85% identical along its length to a portion of a viral nucleic acid encoding a viral protein, or its complement. In an embodiment of the invention, the viral protein is obtained from a virus selected from the group consisting of human respiratory syncytial virus, human metapneumovirus, human parainfluenza virus 1, human parainfluenza virus 2, human parainfluenza virus 3, human parainfluenza virus 4a, human parainfluenza virus 4b, rhinovirus and influenza virus. In another embodiment of the invention, the viral protein is a respiratory virus protein. In another embodiment of the invention, the viral protein is an influenza virus protein.

[0011] Another aspect of the invention is an RNAi-inducing entity targeted to an influenza virus protein transcript, wherein said RNAi-inducing entity is between about 15 and about 60 nucleotides in length and comprises: a first nucleic acid sequence comprising a nucleic acid sequence selected from the group consisting of SEQ ID NOS. 1-10709, its complement, a fragment of either having a length of at least 16 nucleotides or a nucleotide sequence at least 80% homologous to said nucleic acid sequence; and a second nucleic acid sequence that is at least 80% complementary to the first nucleic acid sequence. In an embodiment of the invention, the second nucleic acid sequence is at least about 90% complementary to said first nucleic acid portion. In another embodiment of the invention, the RNAi-inducing entity is an siRNA or an shRNA. In another embodiment of the invention, the RNAi-inducing entity is an shRNA and further comprises a third nucleic acid sequence that forms a hairpin loop structure. In a related embodiment, the hairpin loop structure comprises between 4 and 11 nucleotides.

[0012] Another aspect of the invention is an siRNA targeted to a conserved site of a viral protein transcript, wherein said RNAi-inducing entity is between about 15 and about 60 nucleotides in length. In an embodiment of the invention, the conserved site is about 300 nucleotides in length and comprises the 3′ end of said viral protein gene. In another embodiment of the invention, the viral protein is obtained from a virus selected from the group consisting of human respiratory syncytial virus, human metapneumovirus, human parainfluenza virus 1, human parainfluenza virus 2, human parainfluenza virus 3, human parainfluenza virus 4a, human parainfluenza virus 4b, rhinovirus and influenza virus. In another embodiment of the invention, the viral protein is a respiratory virus protein. In another embodiment of the invention, the viral protein is an influenza virus protein.

[0013] Another aspect of the invention is an siRNA that reduces the expression of a first gene encoding a first viral protein and a second gene encoding a second viral protein. In an embodiment of the invention, the first and second viral genes are from different strains of the same virus. In another embodiment of the invention, the first and second viral genes are from two different viruses. In a related embodiment, one virus is an influenza virus.

[0014] Another aspect of the invention is an siRNA that reduces the expression of two or more genes encoding viral proteins by at least about 25%.

[0015] Another aspect of the invention is an RNAi-inducing agent targeted to a transcript whose sequence comprises a target portion of a nucleic acid encoding a viral protein. In an embodiment of the invention, the RNAi-inducing agent is an siRNA or shRNA. In another embodiment of the invention, the viral protein is obtained from a virus selected from the group consisting of human respiratory syncytial virus, human metapneumovirus, human parainfluenza virus 1, human parainfluenza virus 2, human parainfluenza virus 3, human parainfluenza virus 4a, human parainfluenza virus 4b, rhinovirus and influenza virus. In another embodiment of the invention, the viral protein is a respiratory virus protein. In another embodiment of the invention, the viral protein is an influenza protein.

[0016] Another aspect of the invention is a composition comprising a first siRNA and a second siRNA, each of which reduces the expression of a gene encoding a viral protein. In an embodiment of the invention, the first siRNA reduces the expression of a first gene encoding a first viral protein and said second siRNA reduces the expression of a second gene encoding a second viral protein. In a related embodiment of the invention, the first and second siRNAs reduce the expression of at said first and second genes by at least about 25%. In another related embodiment of the invention, first and second genes are from two strains of the same viral species. In another related embodiment of the invention, the first and second genes are from two species of the same viral genus. In another related embodiment of the invention, the first and second genes are from two viruses of the same viral family. In another embodiment of the invention, the composition further comprising a third siRNA that reduces the expression of a third gene encoding a third viral protein by at least about 25%. In a related embodiment, the composition further comprising a cationic polymer.

[0017] Another aspect of the invention is a diagnostic kit comprising a primer or probe that detects a viral protein gene over at least part of said gene, wherein said part is a conserved site.

[0018] Another aspect of the invention is a method of reducing expression of a target viral gene in a virally-infected mammalian cell, comprising the step of contacting said cell with an siRNA that reduces expression of a viral protein gene, such that said siRNA enters the cytoplasm of said mammalian cell and reduces the expression of said viral protein gene by at least about 25%. In an embodiment of the invention, the viral protein is obtained from a virus selected from the group consisting of human respiratory syncytial virus, human metapneumovirus, human parainfluenza virus 1, human parainfluenza virus 2, human parainfluenza virus 3, human parainfluenza virus 4a, human parainfluenza virus 4b, rhinovirus and influenza virus. In another embodiment of the invention, the viral protein gene is a respiratory virus protein gene. In another embodiment of the invention, the viral protein gene is an influenza virus protein gene.

[0019] Another aspect of the invention is a method of delivering an siRNA to a subject in need thereof, comprising administering to said subject a composition comprising an effective amount of said siRNA, wherein said siRNA reduces the expression of a viral protein gene by at least about 25%. In an embodiment of the invention, siRNA is delivered to said subject at a concentration of between about 0.1 mg/kg of subject's body weight and about 20 mg/kg of subject's body weight. In another embodiment of the invention, the siRNA is delivered to said subject at a concentration of between about 0.1 mg/kg of subject's body weight and about 10 mg/kg of subject's body weight. In another embodiment of the invention, the siRNA is delivered to said subject at a concentration of between about 0.1 mg/kg of subject's body weight and about 50 mg/kg of subject's body weight. In another embodiment of the invention, the siRNA reduces the expression of a viral protein gene by at least about 25%. In another embodiment of the invention, the siRNA comprises a nucleic acid sequence listed in Tables 1-9. In another embodiment of the invention, the composition further comprises a cationic polymer. In another embodiment of the invention, the composition is administered by inhalation, intranasally, orally, or intravenously.

[0020] Another aspect of the invention is a method of preventing or treating a viral infection in a subject comprising administering a therapeutic compound comprising an siRNA or shRNA targeted to a protein gene of the virus to the subject. In an embodiment of the invention, the siRNA or said shRNA is between about 15 and about 60 nucleotides in length and comprises: a first nucleic acid sequence that is at least about 85% identical to a portion of a nucleic acid encoding a viral protein; and a second nucleic acid sequence that is at least 85% complementary to the first nucleic acid portion. In another embodiment of the invention, the siRNA is double stranded siRNA molecule, wherein each strand of said siRNA molecule is about 15 to about 50 nucleotides, and wherein one strand of said siRNA molecule comprises a nucleic acid sequence identical to a conserved site, or a variant thereof, within the nucleic acid sequence of the respiratory virus. In another embodiment of the invention, the respiratory virus is selected from the group consisting of respiratory syncytial virus, human metapneumovirus, human parainfluenza virus 1, human parainfluenza virus 2, human parainfluenza virus 3, human parainfluenza virus 4a, human parainfluenza virus 4b, rhinovirus and influenza virus. In another embodiment of the invention, the nucleic acid sequence encodes a nucleoprotein gene. In another embodiment of the invention, the respiratory virus is influenza virus, and wherein the siRNA is not selected from the group consisting of SEQ ID NO. 10710-10751. In another embodiment of the invention, the therapeutic compound comprises a cationic polymer.

[0021] Another aspect of the invention is a use of an siRNA molecule in the manufacture of a medicament for inhibiting production of a virus in the respiratory system of a mammalian subject, comprising administering a therapeutic compound comprising an siRNA or shRNA targeted to a protein gene of the virus to the subject. In an embodiment of the invention, the siRNA or said shRNA is between about 15 and about 60 nucleotides in length and comprises: a first nucleic acid sequence that is at least about 85% identical to a portion of a nucleic acid encoding a viral protein; and a second nucleic acid sequence that is at least 85% complementary to the first nucleic acid portion. In another embodiment of the invention, the siRNA is double stranded siRNA molecule, wherein each strand of said siRNA molecule is about 15 to about 50 nucleotides, and wherein one strand of said siRNA molecule comprises a nucleic acid sequence identical to a conserved site, or a variant thereof, within the nucleic acid sequence of the respiratory virus. In another embodiment of the invention, the respiratory virus is selected from the group consisting of respiratory syncytial virus, human metapneumovirus, human parainfluenza virus 1, human parainfluenza virus 2, human parainfluenza virus 3, human parainfluenza virus 4a, human parainfluenza virus 4b, rhinovirus and influenza virus. In another embodiment of the invention, the nucleic acid sequence encodes a protein (NP) gene. In another embodiment of the invention, the respiratory virus is influenza virus, and wherein the siRNA is not selected from the group consisting of SEQ ID NO. 10710-10751. In another embodiment of the invention, the respiratory virus is influenza virus, and wherein the siRNA is selected from the group consisting of SEQ ID NO. 1-10709.

[0022] Another aspect of the invention is a method for identifying an siRNA or shRNA target sequence that is present in a viral protein transcript of two or more viruses, comprising the steps of: a) providing a nucleic acid sequence encoding a viral protein from a virus; b) identifying a target portion of said nucleic acid sequence, wherein said portion comprises about 19 nucleotides and does not comprise more than three contiguous guanine nucleotides or more than three contiguous cytosine nucleotides; and c) repeating steps (a) and (b) one or more times, using different viruses with each repetition, thereby identifying an siRNA or shRNA target sequence on said viral protein transcript. In an embodiment of the invention, the nucleic acid sequence comprises a conserved site of a protein sequence. In another embodiment of the invention, the method further comprising generating an siRNA or shRNA that binds to said target sequence.

[0023] Another aspect of the invention is a method of diagnosing a viral infection, comprising the step of determining whether the subject is infected with a virus that is susceptible to inhibition by the RNAi-inducing entity. In an embodiment of the invention, the method further comprising the step of administering the RNAi-inducing entity to the subject.

[0024] Another aspect of the invention is a method of treating or preventing an influenza virus infection comprising administering the RNAi-inducing entity to a subject in need thereof.

[0025] Another aspect of the invention is a double stranded siRNA molecule that inhibits production of a respiratory virus, wherein each strand of said siRNA molecule is about 15 to about 50 nucleotides, and wherein one strand of said siRNA molecule comprises a nucleic acid sequence identical to a conserved site, or a variant thereof, within the nucleic acid sequence of the respiratory virus. In an embodiment of the invention, the respiratory virus is selected from the group consisting of respiratory syncytial virus, human metapneumovirus, human parainfluenza virus 1, human parainfluenza virus 2, human parainfluenza virus 3, human parainfluenza virus 4a, human parainfluenza virus 4b, rhinovirus and influenza virus. In a related embodiment, the nucleic acid sequence encodes a protein (NP) gene. In another embodiment of the invention, the respiratory virus is influenza virus, and wherein the siRNA is not selected from the group consisting of SEQ ID NO. 10710-10751. In another embodiment of the invention, the respiratory virus is influenza virus, and wherein the siRNA is selected from the group consisting of SEQ ID NO. 1-10709.

### BRIEF DESCRIPTION OF THE FIGURES

[0026] FIG. 1. A-K series of nucleic acid sequence alignments of target viruses of the invention are presented. FIG. 1A discloses SEQ ID NOS: 11,426-11,430, respectively in order of appearance. FIG. 1B discloses SEQ ID NOS: 11,431-11,434, respectively in order of appearance. FIG. 1C discloses SEQ ID NOS: 11,435-11,440, respectively in order of appearance. FIG. 1D discloses SEQ ID NOS: 11,441-11,443, respectively in order of appearance. FIG. 1E discloses SEQ ID NOS: 11,444-11,446, respectively in order of appearance. FIG. 1F discloses SEQ ID NOS: 11,447-11,450, respectively in order of appearance. FIG. 1G discloses SEQ ID NOS: 11,451-11,454, respectively in order of appearance. FIG. 1H discloses SEQ ID NOS: 11,455-11,458, respectively in order of appearance. FIG. 1I discloses SEQ ID NOS: 11,459-11,461, respectively in order of appearance. FIG. 1J discloses SEQ ID NOS: 11,462-11,465, respectively in order of appearance. FIG. 1K discloses SEQ ID NOS: 11,466-11,470, respectively in order of appearance.

[0027] FIG. 2. Influenza virus production is inhibited in mice by administration of influenza-specific siRNA. Mice were intravenously injected with increasing amounts of NP-1496 siRNA or GFP siRNA complexed with jetPEI. Three hours later, mice were infected with the PR8 variant of influenza A. Viral titers were measured 24 hours post-infection using lung homogenates in the MDCK-HA assay. Each data point represents one mouse. P values between groups indicate statistical significance.

[0028] FIG. 3. Therapeutic administration of siRNA inhibits influenza virus production in mice. Mice were injected with NP-siRNA or PA-siRNA complexed with jetPEI 5 hours following influenza infection. Virus titers were measured in lung homogenates 28 hours post-infection by MDCK-HA assay. Each data point represents one mouse. P values between groups indicate statistical significance.

[0029] FIG. 4. Influenza-specific siRNA treatment provides broad cross-protection against lethal challenge with highly pathogenic H5 and H7 avian influenza A viruses. BALB/c mice (8 per group) were given 50 μg siRNA intravenously one day before virus challenge and another 20 μg of siRNA intranasally on the day of virus challenge. Body weights and survival of mice were monitored for 16 days after 10 LD50 dose of intranasal virus challenge. Filled circles, GFP-specific siRNA; open circles, NP plus PA-specific siRNAs. P values are indicated.

[0030] FIG. 5. BALB/c mice were treated intranasally with indicated amounts of NP specific siRNA in PBS or PBS control. Two hours later, all mice were infected intranasally (1000 pfu/mouse) with the PR8 serotype. The lungs were harvested 24 hours post-infection, and viral titer was measured from lung homogenates by MDCK-HA assay. P values between PBS and siRNA groups indicate statistical significance with 0.5, 1 and 2 mg/kg siRNA treated groups.

[0031] FIG. 6. BALB/c mice were administered control and NP-targeting siRNA intranasally (10 mg/kg, in PBS). Three hours later all the mice were infected i.n with PR8 virus (50 pfu/mouse). The lungs were harvested at 24 and 48 hours post-infection and total RNA was isolated from the left lung. Total mRNA was reverse transcribed to cDNA using dT18 primers. Real time PCR was carried out using PB1 specific primers to quantify viral mRNA levels. GAPDH was used as an internal control. The right and middle lungs were homogenized and the viral titer was measured by MDCK-HA assay. The virus titer in the samples at 48 hour post-infection is shown in the figure (statistic significance was found between PBS and NP siRNA treated group using student t test (p=0.01); the titer in the samples 24 hours post-infection was too low to detect, possibly due to siRNA directed suppression.

[0032] FIG. 7. Balb/c mice were treated intranasally with 10 mg/kg cyclophilin B specific siRNA or GFP siRNA in PBS or PBS control. There were five mice per group. The mouse lungs were harvested 24 later. Total RNA was purified from the lung samples and reverse transcription was conducted using dT18 primer. Cyclophilin B-specific primers were used in real-time PCR to quantify the target mRNA level. GAPDH-specific primers were also used in the PCR reaction as control.

[0033] FIG. 8. Influenza virus suppression in vivo by intranasal administration of cochleate siRNA formulations is shown.

[0034] FIG. 9. Influenza virus suppression in vivo by intravenous administration of cochleate siRNA formulations is shown.

[0035] FIG. 10A. Dose-response profile of intravenously administered siRNA delivered in cochleate formulations for influenza virus suppression.

[0036] FIG. 10B. Influenza virus suppression in vivo by oral gavage administration of cochleate siRNA formulations is shown.

[0037] FIGS. 11A-C. The results of experiments indicating that siRNA inhibits influenza virus production in MDCK cells are shown. Six different siRNAs that target various viral transcripts were introduced into MDCK cells by electroporation, and cells were infected with virus 8 hours later. FIG. 11A is a time course showing viral titer in culture supernatants as measured by hemagglutinin assay at various times following-infection with viral strain A/PR/8/34 (H1N1) (PR8), at a multiplicity of infection (MOI) of 0.01 in the presence or absence of the various siRNAs or a control siRNA. FIG. 11B is a time course showing viral titer in culture supernatants as measured by hemagglutinin assay at various times following infection with influenza virus strain A/WSN/33 (H1N1) (WSN) at an MOI of 0.01 in the presence or absence of the various siRNAs or a control siRNA. FIG. 11C shows a plaque assay showing viral titer in culture supernatants from virus infected cells that were either mock transfected or transfected with siRNA NP-1496. FIG. 11D shows inhibition of influenza virus production at different doses of siRNA. MDCK cells were transfected with the indicated amount of NP-1496 siRNA followed by infection with PR8 virus at an MOI of 0.01. Virus titer was measured 48 hours after infection. Representative data from one of two experiments are shown.

[0038] FIG. 12. Positions of various siRNAs relative to influenza virus gene segments, correlated with effectiveness in inhibiting influenza virus are shown.

[0039] FIG. 13A. A schematic of a developing chicken embryo indicating the area for injection of siRNA and siRNA/delivery agent compositions is shown.

[0040] FIG. 13B. The ability of various siRNAs to inhibit influenza virus production in developing chicken embryos is shown.

[0041] FIG. 14. A schematic showing the interaction of nucleoprotein with viral RNA molecules is shown.

[0042] FIG. 15. Schematic diagrams illustrating the differences between influenza virus vRNA, mRNA, and cRNA (template RNA) and the relationships between them are shown.

[0043] FIG. 16. Amounts of viral NP and NS RNA species at various times following infection with virus, in cells that were mock transfected or transfected with siRNA NP-1496 6-8 hours prior to infection are shown. A(n) sequence disclosed as SEQ ID NO: 11,492.

[0044] FIGS. 17A and 17B. FIG. 17A shows that inhibition of influenza virus production requires a wild type (wt) antisense strand in the duplex siRNA. MDCK cells were first transfected with siRNAs formed from wt and modified (m) strands and infected 8 hrs later with PR8 virus at MOI of 0.1. Virus titers in the culture supernatants were assayed 24 hrs after infection. Representative data from one of the two experiments are shown. FIG. 17B shows that M-specific siRNA inhibits the accumulation of specific mRNA. MDCK cells were transfected with M-37, infected with PR8 virus at MOI of 0.01, and harvested for RNA isolation 1, 2, and 3 hrs after infection. The levels of M-specific mRNA, cRNA, and vRNA were measured by reverse transcription using RNA-specific primers, followed by real time PCR. The level of each viral RNA species is normalized to the level of .gamma.-actin mRNA (bottom panel) in the same sample. The relative levels of RNAs are shown as mean value.±.S.D. Representative data from one of the two experiments are shown.

[0045] FIG. 18A-D. Show that NP-specific siRNA inhibits the accumulation of not only NP-but also M- and NS-specific mRNA, vRNA, and cRNA. MDCK (A-C) and Vero (D) cells were transfected with NP-1496, infected with PR8 virus at MOI of 0.1, and harvested for RNA isolation 1, 2, and 3 hrs after infection. The levels of mRNA, cRNA, and vRNA specific for NP, M, and NS were measured by reverse transcription using RNA-specific primers followed by real time PCR. The level of each viral RNA species is normalized to the level of .gamma.-actin mRNA (not shown) in the same sample. The relative levels of RNAs are shown. Representative data from one of three experiments are shown.

[0046] FIGS. 18E-G. The right side in each figure, show that PA-specific siRNA inhibits the accumulation of not only PA- but also M- and NS-specific mRNA, vRNA, and cRNA. MDCK cells were transfected with PA-1496, infected with PR8 virus at MOI of 0.1, and harvested for RNA isolation 1, 2, and 3 hrs after infection. The levels of mRNA, cRNA, and vRNA specific for PA, M, and NS were measured by reverse transcription using RNA-specific primers followed by real time PCR. The level of each viral RNA species is normalized to the level of .gamma.-actin mRNA (not shown) in the same sample. The relative levels of RNAs are shown.

[0047] FIG. 18H. FIG. 18H shows that NP-specific siRNA inhibits the accumulation of PB1-(top panel), PB2-(middle panel) and PA-(lower panel) specific mRNA. MDCK cells were transfected with NP-1496, infected with PR8 virus at MOI of 0.1, and harvested for RNA isolation 1, 2, and 3 hrs after infection. The levels of mRNA specific for PB1, PB2, and PA mRNA were measured by reverse transcription using RNA-specific primers followed by real time PCR. The level of each viral RNA species is normalized to the level of .gamma.-actin mRNA (not shown) in the same sample. The relative levels of RNAs are shown.

[0048] FIGS. 19A-C. FIG. 19A is a plot showing that siRNA inhibits influenza virus production in mice when administered together with the cationic polymer PEI prior to infection with influenza virus. Filled squares (no treatment); Open squares (GFP siRNA); Open circles (30 .mu.g NP siRNA); Filled circles (60 .mu.g NP siRNA). Each symbol represents an individual animal. p values between different groups are shown. FIG. 19B is a plot showing that siRNA inhibits influenza virus production in mice when administered together with the cationic polymer PLL prior to infection with influenza virus. Filled squares (no treatment); Open squares (GFP siRNA); Filled circles (60 .mu.g NP siRNA). Each symbol represents an individual animal. p values between different groups are shown. FIG. 19C is a plot showing that siRNA inhibits influenza virus production in mice when administered together with the cationic polymer jetPEI prior to infection with influenza virus significantly more effectively than when administered in PBS. Open squares (no treatment); Open triangles (GFP siRNA in PBS); Filled triangles (NP siRNA in PBS); Open circles (GFP siRNA with jetPEI); Filled circles (NP siRNA with jetPEI). Each symbol represents an individual animal. p values between different groups are shown.

[0049] FIG. 20. A plot showing that siRNAs targeted to influenza virus NP and PA transcripts exhibit an additive effect when administered together prior to infection with influenza virus. Filled squares (no treatment); Open circles (60 .mu.g NP siRNA); Open triangles (60 .mu.g PA siRNA); Filled circles (60 .mu.g NP siRNA+60 .mu.g PA siRNA). Each symbol represents an individual animal. p values between different groups are shown.

[0050] FIG. 21. A plot showing that siRNA inhibits influenza virus production in mice when administered following infection with influenza virus. Filled squares (no treatment); Open squares (60 .mu.g GFP siRNA); Open triangles (60 .mu.g PA siRNA); Open circles (60 .mu.g NP siRNA); Filled circles (60 .mu.g NP+60 .mu.g PA siRNA). Each symbol represents an individual animal. p values between different groups are shown.

[0051] FIGS. 22A-C. FIG. 22A is a schematic diagram of a lentiviral vector expressing a shRNA. Transcription of shRNA is driven by the U6 promoter. EGFP expression is driven by the CMV promoter. SIN-LTR, .PSI., cPPT, and WRE are lentivirus components. The sequence of NP-1496 shRNA is shown. FIG. 22B presents plots of flow cytometry results demonstrating that Vero cells infected with the lentivirus depicted in FIG. 22B express EGFP in a dose-dependent manner. Lentivirus was produced by co-transfecting DNA vector encoding NP-1496a shRNA and packaging vectors into 293T cells. Culture supernatants (0.25 ml or 1.0 ml) were used to infect Vero cells. The resulting Vero cell lines (Vero-NP-0.25 and Vero-NP-1.0) and control (uninfected) Vero cells were analyzed for GFP expression by flow cytometry. Mean fluorescence intensity of Vero-NP-0.25 (upper portion of figure) and Vero-NP-1.0 (lower portion of figure) cells are shown. The shaded curve represents mean fluorescence intensity of control (uninfected) Vero cells. FIG. 22C is a plot showing inhibition of influenza virus production in Vero cells that express NP-1496 shRNA. Parental and NP-1496 shRNA expressing Vero cells were infected with PR8 virus at MOI of 0.04, 0.2 and 1. Virus titers in the supernatants were determined by hemagglutination (HA) assay 48 hrs after infection.

[0052] FIG. 23. A plot showing that influenza virus production in mice is inhibited by administration of DNA vectors that express siRNA targeted to influenza virus transcripts. Sixty .mu.g of DNA encoding RSV, NP-1496 (NP) or PB1-2257 (PB1) shRNA were mixed with 40 mu.l Infasurf and were administered into mice by instillation. For no treatment (NT) group, mice were instilled with 60 mu.l of 5% glucose. Thirteen hrs later, the mice were infected intranasally with PR8 virus, 12000 pfu per mouse. The virus titers in the lungs were measured 24 hrs after infection by MDCK/hemagglutinin assay. Each data point represents one mouse. p values between groups are indicated.

### DETAILED DESCRIPTION OF THE INVENTION

[0053] The present invention is based on the intracellular phenomenon of RNA interference (RNAi). Therein, the presence in a cell of double-stranded RNA containing a portion that is complementary to a target RNA inhibits expression of the target RNA in a sequence-specific manner. Generally, inhibition is caused by cleavage of the target or inhibition of its translation. While RNAi is a normal cellular response to insults such as pathogen infection, it is also an effective mechanism to return to stasis the system perturbed by a such an infection. Further, RNAi can be used to specifically disrupt cellular signaling pathways.

[0054] The double-stranded RNA structures that drive RNAi activity are siRNAs, shRNAs, and other double-stranded structures (dsRNAs) that can be processed to yield an siRNA or shRNA (or any other small RNA species that inhibits expression of a target transcript by RNA interference). RNAi-inducing entities such as siRNAs and shRNAs can be introduced into a subject, or an isolated cell thereof, and modulate specific signaling pathways. Further, these dsRNAs are useful therapeutics to prevent and treat diseases or disorders characterized by aberrant cell signaling. For instance, virus that infect mammals replicate by taking control of cellular machinery of the host cell. It is therefore useful to use RNAi technology to disrupt the viral signaling pathway that controls virus production.

[0055] It is known that certain viral genes control critical in two stages of the viral life cycle. Prior work in the art has focused on the viral polymerases are effective targets for siRNA as they are required for viral replication. For example, RNA-dependent RNA polymerase (RdRP) is an essential polypeptide in both transcription and replication. This has led to the speculation that silencing of RdRP subunits would lead to a nearly total loss of all RNA synthesis and thus result in a drastic inhibition of virus production. Indeed, this result has been observed in RSV, vesicular stomatitis and parainfluenza virus. (See, Barik S. Control of nonsegmented negative-strand RNA virus replication by siRNA. Virus Res. Jun. 1, 2004;102(1):27-35; and Bitko et al., Phenotypic silencing of cytoplasmic genes using sequence-specific double-stranded short interfering RNA and its application in the reverse genetics of wild type negative-strand RNA viruses. BMC Microbiol. 2001;1(1):34. Epub Dec. 20, 2001.) Another viral protein, variously termed nucleoprotein, capsid, or nucleocapsid, is recognized to be involved in, e.g., viral transcription and replication. However, antisense studies performed on nucleoprotein did not indicate that the transcript encoding this polypeptide is as suitable a target as polymerase. (See, Hatta et al. Inhibition of influenza virus RNA polymerase and nucleoprotein genes expression by unmodified, phosphorothioated, and liposomally encapsulated oligonucleotides. Biochem Biophys Res Commun. Jun. 14, 1996;223(2):341-6; and Mizuta et al. Antisense oligonucleotides directed against the viral RNA polymerase gene enhance survival of mice infected with influenza A. Nat Biotechnol. June 1999;17(6):583-7.) Recent studies with siRNA have suggested that nucleoprotein be investigated as a possible target of siRNA. Gitlin et al. Short interfering RNA confers intracellular antiviral immunity in human cells. Nature. Jul. 25, 2002;418(6896):430-4; Fowler et al. Inhibition of Marburg virus protein expression and viral release by RNA interference. J Gen Virol. April 2005;86(Pt 4):1181-8; and Yuan et al. Inhibition of coxsackievirus B3 replication by small interfering RNAs requires perfect sequence match in the central region of the viral positive strand. J Virol. February 2005;79(4):2151-9). The present invention demonstrates the use of siRNAs directed to viral nucleoprotein sequences to disrupt viral signaling pathways and inhibit viral replication. Further, the present inventors determined that inhibition or silencing of another viral protein, nucleoprotein or nucleocapsid protein, has similar effects to inhibiting polymerase activity. Thus, a nucleoprotein transcript is preferred target for siRNA.

[0056] While not wishing to be bound by any theory, the broad effect of NP siRNA is likely a result of the importance of NP in binding and stabilizing vRNA and cRNA, instead of NP-specific siRNA non-specifically targeting RNA degradation. For example, the NP gene segment in influenza virus encodes a single-stranded RNA-binding nucleoprotein, which can bind to both vRNA and cRNA. During the viral life cycle, NP mRNA is first transcribed and translated. The primary function of the NP protein is to encapsidate the virus genome for the purpose of RNA transcription, replication and packaging. In the absence of NP protein, the full-length synthesis of both vRNA and cRNA is strongly impaired. When NP siRNA induces the degradation of NP RNA, NP protein synthesis is impaired and the resulting lack of sufficient NP protein subsequently affects the replication of other viral gene segments. In this way, NP siRNA is able to potently inhibit virus production at a very early stage. Thus, the multifunctional properties of viral nucleoproteins make them useful targets for RNAi-based therapy, offering the opportunity to intervene at multiple different stages of the viral life cycle by inhibiting a single gene.

[0057] It has been hypothesized that the number of NP protein molecules in infected host cells regulates mRNA synthesis, as opposed to replication of genome RNA (vRNA and cRNA). Using a temperature-sensitive mutation in the NP protein, previous studies have shown that cRNA, but not mRNA, synthesis was temperature sensitive both in vitro and in vivo. NP protein has been shown to be required for elongation and anti-termination of the nascent cRNA and vRNA transcripts. The results presented herein demonstrate that viral NP-specific siRNA inhibits the accumulation of all viral RNAs in infected cells. While not wishing to be bound by any theory, it appears probable that in the presence of NP-specific siRNA, the newly transcribed NP mRNA is degraded, resulting in the inhibition of NP protein synthesis following virus infection. Without newly synthesized NP, further viral transcription and replication, and therefore new virion production is inhibited.

[0058] The features and other details of the invention will now be more particularly described with reference to the accompanying drawings and pointed out in the claims. It will be understood that particular embodiments described herein are shown by way of illustration and not as limitations of the invention. The principal features of this invention can be employed in various embodiments without departing from the scope of the invention. All parts and percentages are by weight unless otherwise specified.

### Definitions

[0059] For convenience, certain terms used in the specification, examples, and appended claims are collected here. Unless otherwise defined, all technical and scientific terms used herein have the same meaning as commonly understood by one of ordinary skill in the art to which this invention pertains. However, to the extent that these definitions vary from meanings circulating within the art, the definitions below are to control.

[0060] A “nucleotide” comprises a nitrogenous base, a sugar molecule, and a phosphate group. A “nucleoside” comprises a nitrogenous base (nucleobase) linked to a sugar molecule. In a naturally occurring nucleic acid, phosphate groups covalently link adjacent nucleosides to form a polymer. A nucleic acid may include naturally occurring nucleosides (e.g., adenosine, thymidine, guanosine, cytidine, uridine, deoxyadenosine, deoxythymidine, deoxyguanosine, and deoxycytidine), nucleoside analogs (e.g., 2-aminoadenosine, 2-thiothymidine, inosine, pyrrolo-pyrimidine, 3-methyl adenosine, C5-propynylcytidine, C5-propynyluridine, C5-bromouridine, C5-fluorouridine, C5-iodouridine, C5-methylcytidine, 7-deazaadenosine, 7-deazaguanosine, 8-oxoadenosine, 8-oxoguanosine, O(6)-methylguanine, and 2-thiocytidine), chemically modified bases, biologically modified bases (e.g., methylated bases), intercalated bases, modified sugars (e.g., 2′-fluororibose, ribose, 2′-deoxyribose, arabinose, and hexose).

[0061] The term “RNA” or “RNA molecule” or “ribonucleic acid molecule” refers to a polymer of ribonucleotides. The term “DNA” or “DNA molecule” or deoxyribonucleic acid molecule” refers to a polymer of deoxyribonucleotides. DNA and RNA can be synthesized naturally (e.g, by DNA replication or transcription of DNA or RNA, respectively). RNA can be post-transcriptionally modified. DNA and RNA can also be chemically synthesized. The terms “target mRNA” and “target transcript” are synonymous as used herein.

[0062] The term “RNA interference” (“RNAi”) refers to selective intracellular degradation of RNA (also referred to as gene silencing). RNAi also includes translational repression by microRNAs or siRNAs acting like microRNAs. RNAi can be initiated by introduction of small interfering RNAs (siRNAs) or production of siRNAs intracellularly (e.g., from a plasmid or transgene), to silence the expression of one or more target genes. Alternatively, RNAi occurs in cells naturally to remove foreign RNAs (e.g., viral RNAs). Natural RNAi proceeds via dicer-directed fragmentation of precursor dsRNA which direct the degradation mechanism to other cognate RNA sequences.

[0063] The term “small interfering RNA” (“siRNA”), also referred to in the art as “short interfering RNAs,” refers to an RNA (or RNA analog) comprising between about 10-60 nucleotides (or nucleotide analogs) that is capable of directing or mediating RNA interference. The term “siRNA” includes both double stranded siRNA and single stranded siRNA. Generally, as used herein the term “siRNA” refers to double stranded siRNA (as compared to single stranded or antisense RNA). The term “short hairpin RNA” (“shRNA”) refers to an siRNA (or siRNA analog) precursor that is folded into a hairpin structure and contains a single stranded portion of at least one nucleotide (a “loop”), e.g., an RNA molecule that contains at least two complementary portions hybridized or capable of hybridizing to form a double-stranded (duplex) structure sufficiently long to mediate RNAi (as described for siRNA duplexes), and at least one single-stranded portion, typically between approximately 1 and 10 nucleotides in length that forms a loop connecting the regions of the shRNA that form the duplex portion. The duplex portion may, but typically does not, contain one or more mismatches and/or one or more bulges consisting of one or more unpaired nucleotides in either or both strands. Without wishing to be bound by theory, shRNAs are thought to be processed into siRNAs by the conserved cellular RNAi machinery. shRNAs are capable of inhibiting expression of a target transcript that is complementary to a portion of the shRNA (referred to as the antisense or guide strand of the shRNA). In general, the features of the duplex formed between the guide strand of the shRNA and a target transcript are similar to those of the duplex formed between the guide strand of an siRNA and a target transcript. In certain embodiments of the invention the 5′ end of an shRNA has a phosphate group while in other embodiments it does not. In certain embodiments of the invention the 3′ end of an shRNA has a hydroxyl group.

[0064] The term “RNAi-inducing entity” or “RNAi agent” refers to an RNA species (other than a naturally occurring molecule not modified by the hand of man or transported into its location by the hand of man) whose presence within a cell results in RNAi and leads to reduced expression of an RNA to which the RNAi agent is targeted. The RNAi agent may be, for example, an siRNA or shRNA. In certain embodiments of the invention an siRNA may contain a strand that inhibits expression of a target RNA via a translational repression pathway utilized by endogenous small RNAs referred to as microRNAs. In certain embodiments of the invention an shRNA may be processed intracellularly to generate an siRNA that inhibits expression of a target RNA via this microRNA translational repression pathway. Any “target RNA” may be referred to as a “target transcript” regardless of whether the target RNA is a messenger RNA. The terms “target RNA” and “target transcript” are used interchangeably herein. The term RNAi-inducing agent encompasses RNAi agents and vectors (other than naturally occurring molecules not modified by the hand of man as described above) whose presence within a cell results in RNAi and leads to reduced expression of a transcript to which the RNAi agent is targeted.

[0065] An “RNAi-inducing vector” includes a vector whose presence within a cell results in transcription of one or more RNAs that self-hybridize or hybridize to each other to form an RNAi agent. In various embodiments of the invention this term encompasses plasmids, e.g., DNA vectors (whose sequence may comprise sequence elements derived from a virus), or viruses, (other than naturally occurring viruses or plasmids that have not been modified by the hand of man), whose presence within a cell results in production of one or more RNAs that self-hybridize or hybridize to each other to form an RNAi agent. In general, the vector comprises a nucleic acid operably linked to expression signal(s) so that one or more RNA molecules that hybridize or self-hybridize to form an RNAi agent is transcribed when the vector is present within a cell. Thus the vector provides a template for intracellular synthesis of the RNAi agent. For purposes of inducing RNAi, presence of a viral genome into a cell (e.g., following fusion of the viral envelope with the cell membrane) is considered sufficient to constitute presence of the virus within the cell. In addition, for purposes of inducing RNAi, a vector is considered to be present within a cell if it is introduced into the cell, enters the cell, or is inherited from a parental cell, regardless of whether it is subsequently modified or processed within the cell. An RNAi-inducing vector is considered to be targeted to a transcript if presence of the vector within a cell results in production of one or more RNAs that hybridize to each other or self-hybridize to form an RNAi agent that is targeted to the transcript, i.e., if presence of the vector within a cell results in production of one or more RNAi agent targeted to the transcript. Use of the term “induce” is not intended to indicate that the RNAi agent necessarily activates or upregulates RNAi in general but simply indicates that presence of the vector within a cell results in production of an RNAi agent within the cell, leading to an RNAi-mediated reduction in expression of an RNA to which the agent is targeted.

[0066] An RNAi-inducing entity is considered to be targeted to a target transcript for the purposes described herein if (1) the agent comprises a strand that is substantially complementary to the target transcript over a window of evaluation between 15-29 nucleotides in length, e.g., 15, more preferably at least about 17, yet more preferably at least about 18 or 19 to about 21-23 or 24-29 nucleotides in length. For example, in various embodiments of the invention the agent comprises a strand that has at least about 70%, preferably at least about 80%, 84%, 89%, 90%, 91%, 92%, 93%, 94%, 95%, 96%, 97%, 98%, 99%, or 100% precise sequence complementarity with the target transcript over a window of evaluation between 15-29 nucleotides in length, e.g., over a window of evaluation of at least 15, more preferably at least about 17, yet more preferably at least about 18 or 19 to about 21-23 or 24-29 nucleotides in length; or (2) one strand of the RNAi agent hybridizes to the target transcript under stringent conditions for hybridization of small (<50 nucleotide) RNA molecules in vitro and/or under conditions typically found within the cytoplasm or nucleus of mammalian cells. In addition, in the case of agents that act via the microRNA translational repression pathway, the duplex formed by the agent and the target contains at least one bulge and/or mismatch. In certain embodiments of the invention a GU or UG base pair in a duplex formed by a guide strand and a target transcript is not considered a mismatch for purposes of determining whether an RNAi agent is targeted to a transcript.

[0067] An RNA-inducing vector whose presence within a cell results in production of an RNAi agent that is targeted to a transcript is also considered to be targeted to the transcript. Since the effect of targeting a transcript is to reduce or inhibit expression of the gene that directs synthesis of the transcript, an RNAi agent targeted to a transcript is also considered to target the gene that directs synthesis of the transcript even though the gene itself (e.g., genomic DNA in the case of a cell) is not thought to interact with the agent or components of the cellular silencing machinery. Thus an RNAi agent or vector that targets a transcript is understood to target the gene that provides a template for synthesis of the transcript.

[0068] A viral “nucleoprotein” (also termed a “capsid protein” or a “nucleocapsid protein”) is a viral polypeptide that sequesters viral RNA and affects viral transcription. The viral nucleoprotein is capable of forming a nucleic acid/protein complex (i.e., a ribonucleoprotein (RNP) complex). Nucleoproteins are also termed “NS” in double stranded viruses (e.g., NS-6). A nucleoprotein is distinguished from an outer capsid protein, which generally does not contact and sequester the viral genome. The terms “nucleoprotein mRNA,” “NP mRNA”, “nucleoprotein transcript,” and “NP transcript” are understood to include any mRNA that encodes a viral nucleoprotein or its functional equivalent as described herein.

[0069] As will be appreciated by one of ordinary skill in the art, proteins fulfilling one or more functions of a viral nucleoprotein are referred to by a number of different names, depending on the particular virus of interest. For example, in the case of certain viruses such as influenza the protein is known as nucleoprotein (NP) while in the case of a number of other single-stranded RNA viruses, proteins that fulfill a similar role are referred to as nucleocapsid (NC or N) proteins. In yet other viruses, analogous proteins that both interact with genomic nucleic acid and play a structural role in the viral particle are considered to be capsid (C) proteins.

[0070] As used herein, the terms “nucleoprotein mRNA,” “NP mRNA”, “nucleoprotein transcript,” and “NP transcript” are understood to include any mRNA that encodes a viral nucleoprotein or its functional equivalent as described herein. Any virus containing a nucleoprotein gene or the functional equivalent thereof is suitable as an siRNA target. By way of non-limiting example, several groups of target viruses are described herein in greater detail.

[0071] “Subject” includes living organisms such as humans, monkeys, cows, sheep, horses, pigs, cattle, goats, dogs, cats, mice, rats, cultured cells therefrom, and transgenic species thereof. In a preferred embodiment, the subject is a human. A subject is synonymous with a “patient.” Administration of the compositions of the present invention to a subject to be treated can be carried out using known procedures, at dosages and for periods of time effective to treat the condition in the subject. An effective amount of the therapeutic compound necessary to achieve a therapeutic effect may vary according to factors such as the age, sex, and weight of the subject, and the ability of the therapeutic compound to treat the foreign agents in the subject. Dosage regimens can be adjusted to provide the optimum therapeutic response. For example, several divided doses may be administered daily or the dose may be proportionally reduced as indicated by the exigencies of the therapeutic situation.

[0072] As used herein, the terms “approximately” or “about” in reference to a number are generally taken to include numbers that fall within a range of 5% in either direction (greater than or less than) the number unless otherwise stated or otherwise evident from the context (except where such number would exceed 100% of a possible value). Where ranges are stated, the endpoints are included within the range unless otherwise stated or otherwise evident from the context.

[0073] The term “complementary” is used herein in accordance with its art-accepted meaning to refer to the capacity for precise pairing between particular bases, nucleosides, nucleotides or nucleic acids. For example, adenine (A) and uridine (U) are complementary; adenine (A) and thymidine (T) are complementary; and guanine (G) and cytosine (C), are complementary and are referred to in the art as Watson-Crick base pairings. If a nucleotide at a certain position of a first nucleic acid sequence is complementary to a nucleotide located opposite in a second nucleic acid sequence, the nucleotides form a complementary base pair, and the nucleic acids are complementary at that position. One of ordinary skill in the art will appreciate that the nucleic acids are aligned in antiparallel orientation (i.e., one nucleic acid is in 5′ to 3′ orientation while the other is in 3′ to 5′ orientation). A degree of complementarity of two nucleic acids or portions thereof may be evaluated by determining the total number of nucleotides in both strands that form complementary base pairs as a percentage of the total number of nucleotides over a window of evaluation when the two nucleic acids or portions thereof are aligned in antiparallel orientation for maximum complementarity. For example, AAAAAAAA (SEQ ID NO: 11424) and TTTGTTAT (SEQ ID NO: 11425) are 75% complementary since there are 12 nucleotides in complementary base pairs out of a total of 16. Nucleic acids that are at least 70% complementary over a window of evaluation are considered substantially complementary over that window. Specifically, if the window of evaluation is 15-16 nucleotides long, substantially complementary nucleic acids may have 0-3 mismatches within the window; if the window is 17 nucleotides long, substantially complementary nucleic acids may have 0-4 mismatches within the window; if the window is 18 nucleotides long, substantially complementary nucleic acids may have may contain 0-5 mismatches within the window; if the window is 19 nucleotides long, substantially complementary nucleic acids may contain 0-6 mismatches within the window. In certain embodiments the mismatches are not at continuous positions. In certain embodiments the window contains no stretch of mismatches longer than two nucleotides in length. In preferred embodiments a window of evaluation of 15-19 nucleotides contains 0-1 mismatch (preferably 0), and a window of evaluation of 20-29 nucleotides contains 0-2 mismatches (preferably 0-1, more preferably 0).

[0074] “Substantially pure” includes compounds, e.g., drugs, proteins or polypeptides that have been separated from components which naturally accompany it. Typically, a compound is substantially pure when at least 10%, more preferably at least 20%, more preferably at least 50%, more preferably at least 60%, more preferably at least 75%, more preferably at least 90%, and most preferably at least 99% of the total material (by volume, by wet or dry weight, or by mole percent or mole fraction) in a sample is the compound of interest. Purity can be measured by any appropriate method, e.g., in the case of polypeptides by column chromatography, gel electrophoresis or HPLC analysis. A compound, e.g., a protein, is also substantially purified when it is essentially free of naturally associated components or when it is separated from the native contaminants which accompany it in its natural state. Included within the meaning of the term “substantially pure” are compounds, such as proteins or polypeptides, which are homogeneously pure, for example, where at least 95% of the total protein (by volume, by wet or dry weight, or by mole percent or mole fraction) in a sample is the protein or polypeptide of interest.

[0075] “Administering” includes routes of administration which allow the compositions of the invention to perform their intended function, e.g., treating or preventing viral disease. A variety of routes of administration are possible including, but not necessarily limited to parenteral (e.g., intravenous, intraarterial, intramuscular, subcutaneous injection), oral (e.g., dietary), inhalation (e.g., aerosol to lung), topical, nasal, rectal, or via slow releasing microcarriers depending on the disease or condition to be treated. Inhalation and parenteral administration are preferred modes of administration. Formulation of the compound to be administered will vary according to the route of administration selected (e.g., solution, emulsion, gels, aerosols, capsule). An appropriate composition comprising the compound to be administered can be prepared in a physiologically acceptable vehicle or carrier and optional adjuvants and preservatives. For solutions or emulsions, suitable carriers include, for example, aqueous or alcoholic/aqueous solutions, emulsions or suspensions, including saline and buffered media, sterile water, creams, ointments, lotions, oils, pastes and solid carriers. Parenteral vehicles can include sodium chloride solution, Ringer's dextrose, dextrose and sodium chloride, lactated Ringer's or fixed oils. Intravenous vehicles can include various additives, preservatives, or fluid, nutrient or electrolyte replenishers (See generally, Remington's Pharmaceutical Science, 16th Edition, Mack, Ed. (1980)).

[0076] “Effective amount” includes those amounts of the composition of the invention which allow it to perform its intended function, e.g., treating or preventing, partially or totally, viral infection as described herein. The effective amount will depend upon a number of factors, including biological activity, age, body weight, sex, general health, severity of the condition to be treated, as well as appropriate pharmacokinetic properties. For example, dosages of the active substance may be from about 0.01 mg/kg/day to about 100 mg/kg/day, advantageously from about 0.1 mg/kg/day to about 10 mg/kg/day. For example, an siRNA is delivered to a subject in need thereof at a dosage of from about 0.1 mg/kg/day to about 5 mg/kg/day. A therapeutically effective amount of the active substance can be administered by an appropriate route in a single dose or multiple doses. Further, the dosages of the active substance can be proportionally increased or decreased as indicated by the exigencies of the therapeutic or prophylactic situation.

[0077] “Pharmaceutically acceptable carrier” includes any and all solvents, dispersion media, coatings, antibacterial and antifungal agents, isotonic and absorption delaying agents, and the like which are compatible with the activity of the compound and are physiologically acceptable to the subject. An example of a pharmaceutically acceptable carrier is buffered normal saline (0.15M NaCl). The use of such media and agents for pharmaceutically active substances is well known in the art. Except insofar as any conventional media or agent is incompatible with the therapeutic compound, use thereof in the compositions suitable for pharmaceutical administration is contemplated. Supplementary active compounds can also be incorporated into the compositions.

[0078] “Additional ingredients” include, but are not limited to, one or more of the following: excipients; surface active agents; dispersing agents; inert diluents; granulating and disintegrating agents; binding agents; lubricating agents; sweetening agents; flavoring agents; coloring agents; preservatives; physiologically degradable compositions such as gelatin; aqueous vehicles and solvents; oily vehicles and solvents; suspending agents; dispersing or wetting agents; emulsifying agents, demulcents; buffers; salts; thickening agents; fillers; emulsifying agents; antioxidants; antibiotics; antifungal agents; stabilizing agents; and pharmaceutically acceptable polymeric or hydrophobic materials. Other “additional ingredients” which may be included in the pharmaceutical compositions of the invention are known in the art and described, e.g., in Remington's Pharmaceutical Sciences.

[0079] “Conserved Sites”

[0080] Conserved sites of a virus are those sites or sequences that are found to be present in more than about 70% of all known sequences for a given region. The set of siRNA having sequence identity to conserved sites are determined by deriving all 19-mer sequence fragments from each of the known viral sequences, and evaluating the frequency in which each sequence fragment is present as an exact match within each of the set of viral sequences. A first viral sequence contains a 19-mer sequence fragment that extends from position 1 through 19, another from position 2 through 20, another from position 3 through 21, and so on until the 19 nucleotide site at the end of the strand.

[0081] Likewise the second, third, and fourth viral sequences are extracted in the same way, all the way down to the last viral sequence in the list. The sequence fragments are then added to a growing table of sequence fragments and a count is maintained of the number of viral sequences that contain each 19-mer fragment. The fragment frequency is expressed as the percent of the viral sequences that contain each specific 19-mer fragment. The set of siRNA of the invention are those having sequence identity with greater than a majority of the known sequences, preferably greater than about 70% of the known sequences.

[0082] “Conserved sites for influenza virus” do not include sequences disclosed in U.S. patent application Ser. No. 10/674,159 filed Sep. 29, 2003, Publication No. US-2004-0242518-A1 (J. Chen, Q. Ge and M. Eisen, “Influenza Therapeutic”) and expressly listed in Table ______, below (Seq. ID Nos. 69-108). Conserved sites for influenza virus may exclude some embodiments disclosed in copending U.S. patent application Ser. No. 11/102,097 filed Apr. 8, 2005 (a CIP of the above identified application), hereby incorporated by reference in its entirety.

[0083] “Variants of a conserved site” include a small number of mismatches that are tolerated between the target RNA and the antisense guide sequence of the siRNA duplex. Thus, a single siRNA duplex targeting a highly conserved site in a virus will often still be active against minor variant species having only one or a few mismatches relative to the conserved site. We used the viral mismatch data in an algorithm to expand the list of potential influenza A viral sequence variants that are targetable by a given siRNA duplex, described below in Example 15.

### Nucleoproteins as RNAi Targets

[0084] The present invention provides compositions and methods using RNAi for treating or preventing virus replication or infection in a subject, such as a human or non-human mammal. Preferably, the virus is an RNA virus. For example, the RNA virus is a negative strand virus. Alternatively, the virus is a positive strand virus or a double stranded (ds) virus. A preferred target RNA is the nucleoprotein (also termed nucleocapsid) transcript, or a transcript of a viral gene that accomplishes the function of the viral nucleoprotein. Any virus containing a nucleoprotein gene or the functional equivalent thereof is suitable as an siRNA target. By way of non-limiting example, several groups of target viruses are described herein in greater detail.

### Negative Strand RNA Viruses

[0085] Negative strand RNA viruses have a viral genome that is in the complementary sense of mRNA. Therefore, one of the first activities of negative strand RNA viruses following entry into a host cell is transcription and production of viral mRNAs. For this purpose, the virions carry an N-RNA structure that consists of the viral RNA (vRNA) that is tightly associated with the viral nucleoprotein (N or NP, sometimes called nucleocapsid protein). The RNA-dependent RNA polymerase binds either directly to the N-RNA, as is the case for influenza virus, or it binds with the help of a co-factor, like the phosphoprotein of the paramyxoviruses and the rhabdoviruses. The intact N-RNA is the actual template for transcription rather than the naked vRNA and nucleoprotein contributes to exposure of the nucleotide bases of the N-RNA for efficient reading by the polymerase.

[0086] Commonalities in expression and replication of ssRNA(−) viruses appear to include distinct transcription and replication functions for the RdRp, probably triggered by binding of the virion nucleoprotein (N or NP) subunits. Thus, both RNA(−) and RNA(+) may be found complexed with N proteins in replication complexes.

[0087] Negative strand RNA viruses useful in the present invention include human respiratory syncytial virus (RSV), human metapneumovirus (hMPV), Mumps virus, Measles virus, Hendra virus, Newcastle disease virus, Influenza virus, Vesicular stomatitis virus (VSV), Hepatitis delta virus, Marburg virus, Ebola virus, Hantaan virus, Sin nombre virus, Lassa fever virus, Lacrosse virus, Rift valley fever virus, Bunyamwera virus, Sandfly fever Sicilian virus, Sabia virus, Guanarito virus, Machupo virus, Junin virus, lymphocytic choriomeningitis virus (LCMV), and parainfluenza virus. Other suitable negative strand RNA viruses are known to those skilled in the art. Genbank Accession numbers for exemplary viral nucleoprotein nucleic acid sequences include U41071, NC_{—}005077, (03362, NC_{—}002045, NC_{—}003443, NC_{—}001781, AY297748, AF389119, AY705373, AY354458, NC_{—}001608, AB027523, and L37904.

### Influenza

[0088] Influenza viruses are enveloped, negative-stranded RNA viruses of the Orthomyxoviridae family. They are classified as influenza types A, B, and C, of which influenza A is the most pathogenic and is believed to be the only type able to undergo reassortment with animal strains. Current vaccines based upon inactivated virus are able to prevent illness in approximately 70-80% of healthy individuals under age 65; however, this percentage is far lower in the elderly or immunocompromised. In addition, the expense and potential side effects associated with vaccine administration make this approach less than optimal. There are four antiviral drugs currently approved in the United States for treatment and/or prophylaxis of influenza, amantadine, rimanadine, zanamivir, and oseltamivir, but their use is limited due to concerns about side effects, compliance, and possible emergence of resistant strains. Therefore, there remains a need for the development of effective therapies for the treatment and prevention of influenza infection.

[0089] Influenza nucleocapsid protein or nucleoprotein (NP) is the major structural protein that interacts with the RNA segments to form RNP. It is encoded by RNA segment 5 of influenza A virus and is 1,565 nucleotides in length. NP contains 498 amino acids. NP protein is critical in virus replication. The number of NP protein molecules in infected cells has been hypothesized to regulate the levels of mRNA synthesis versus genome RNA (vRNA and cRNA) replication (1) Using a temperature-sensitive mutation in the NP protein, previous studies have shown that cRNA, but not mRNA, synthesis was temperature-sensitive both in vitro and in vivo (28, 29). NP protein was also shown to be required for elongation and antitermination of nascent cRNA and vRNA transcripts (29, 30). The present inventors have found that NP-specific siRNA inhibited the accumulation of all viral RNAs in infected cells. Probably, in the presence of NP-specific siRNA, the newly transcribed NP mRNA is degraded, resulting in inhibition of NP protein synthesis. Without newly synthesized NP, further viral transcription and replication are blocked, as is new virion production.

### Parainfluenza Virus

[0090] Parainfluenza virus (PIV) is enveloped, has a nonsegmented negative-strand RNA genome and belong to the family Paramyxoviridae of the order Mononegavirales. The parainfluenza viruses comprise two of the three genera of the subfamily Paramyxovirinae, namely Respirovirus (hPIV1 and hPIV3) and Rubulavirus (hPIV2 and hPIV4). PIV is second to RSV as a common cause of lower respiratory tract disease in infants and children. PIV can cause repeated infections throughout life, usually manifested by an upper respiratory tract illness (e.g., a cold and/or sore throat). PIV can also cause serious lower respiratory tract disease (e.g., pneumonia, bronchitis, and bronchiolitis), especially among the elderly, and among patients with compromised immune system. Only symptomatic treatment will be used for croup. Specific antiviral treatment is not available. Nucleocapsid (NP) protein is 509 to 557 amino acids in length and the amino acid sequence is relatively well conserved. The NP encapsidates genomic and antigenomic RNA, with each NP monomer associating with six nucleotides. RNA replication is dependent on cosynthetic encapsidation of the nascent RNA by NP. The N-terminal 75% of the moclecule is the more highly conserved part. It is involved in forming the soluble complex with P as well as in subsequently associating with other NP monomers and with RNA to form the nucleocapsid.

### Respiratory Syncytial Virus

[0091] Respiratory syncytial virus (RSV) is a negative-sense, enveloped RNA virus belonging to the genus pneumovirus in paramyxoviridae. RSV infects upper and lower respiratory tract of essentially all children within the first two years of life and is also a significant cause of morbidity and mortality in the elderly. Infants experiencing RSV bronchiolitis are more likely to develop wheezing and asthma later in life. The illness may begin with URT symptoms and progress rapidly over 1-2 days to the diffuse small airway disease. RSV also causes repeated infections throughout life, usually associated with moderate-to-severe cold-like symptoms; however, severe lower respiratory tract disease may occur at any age, especially among the elderly or among those with compromised cardiac, pulmonary, or immune systems.

[0092] Research towards effective treatment and a vaccine against RSV has been ongoing for nearly four decades with few successes. Currently, no vaccine is clinically approved for RSV. The nucleocapsid (N) protein is a major structural protein involved in encapsidation of the RNA genome and is essential for replication and transcription of the genome. It is 1176 nucleotides in length.

### Human Metapneumovirus

[0093] The human metapneumovirus (hMPV) is a member of the family Paramyxoviridae. The virus is negative-sense RNA virus, which can be classified into two genotypes (A and B), has been assigned to the genus Metapneumovirus within the subfamily Pneumovirinae. The virus is responsible for acute respiratory tract infections in young children, elderly patients and immunocompromised hosts. The clinical syndromes associated with this viral infection encompass mild to severe respiratory problems and acute wheezing as well as bronchiolitis and pneumonia. The nucleocapsid (N) gene is 1,206 nucleotides in length, and has substantially similar activity as N in RSV.

### Positive Strand RNA Viruses

[0094] The positive-stranded RNA viruses have wholly or partially translatable genomes, and as a result are usually infectious as naked RNA. These viruses utilize the mechanisms of cap-independent translation initiation, polyprotein processing and RNA replication to regulate expression of their viral genome.

[0095] Several viruses cause disease in humans and animals. Poliovirus has caused severe poliomyelitis worldwide in the past and brought financial burden to developing countries attempting to eradicate the disease. Human rhinovirus causes one of the most widespread viral diseases, the common cold, for which there is no effective treatment or prevention. Foot-and-mouth disease virus (FMDV), an aphthovirus, caused a recent outbreak in sheep and cattle, creating significant financial risks in European agriculture industries. Coxsackie viruses are responsible for diseases such as hand-foot-mouth syndrome (primarily in young children), myocarditis, and ocular conjunctivitis. Hepatitis A virus, a hepatovirus, is known to be a leading cause of liver disease.

[0096] Positive strand RNA viruses useful in the present invention include human astrovirus, Norwalk like virus, Coronavirus, Hepatitis A, C and E viruses, Yellow fever virus, Polio virus, Rhinovirus, Encephalomyocarditis virus, Human parechovirus, HIV-1, Dengue virus, West nile virus, Foot and mouth disease virus, Rubella virus, and Yellow fever virus. Other suitable positive strand RNA viruses are known to those skilled in the art. Genbank Accession numbers for exemplary positive strand viral nucleoprotein nucleic acid sequences include AY391777, AJ313030, NC_{—}001474, AY660002, D83645 (Capsid), X03700 (Capsid), and L24917 (Capsid).

### Human Coronavirus

[0097] Human coronaviruses (HCoVs), members of the Coronaviridae family, are ubiquitous in the environment and are responsible for up to one-third of common colds. The viruses are enveloped viruses that possess a positive-strand RNA genome of up to 31 kb, which represents the largest known genome among all RNA viruses. Human coronaviruses are responsible for 10-30% of all common colds. All age groups are affected, and infection rates have been shown to be uniform for all age groups. Infection may be subclinical or very mild. More severe lower respiratory tract infection has been reported in young children and old people. Reinfections with the similar and different strains is common. Antibodies to one coronavirus group do not protect against infection with viruses from another group or the same group but infect 4 months later.

### West Nile Virus

[0098] West Nile virus (WNV), a member of the family Flaviviridae, has recently spread throughout the United States and the infection resulted in more than 9000 cases and 200 deaths in 2003. It has become the most common cause of viral encephalitis in several states in the US. West Nile virus encephalitis is a zoonosis. The life cycle of the virus includes mainly birds as hosts and mosquitoes as vectors. Humans are accidental hosts, insufficient to support the life cycle of the virus because of low-grade, transient viremia. However, human-to human transmission through blood, organ transplantation, and lactation has been documented. The frequency of severe neurologic disease in the current epidemic suggests a more neurovirulent strain of virus than the one classically associated with West Nile fever. Several neurologic manifestations have been described, but the most characteristic presentation is encephalitis with weakness. Thus far, no therapeutic intervention has shown consistent clinical efficacy in treatment of West Nile virus.

### Rhinovirus

[0099] Human rhinoviruses are the major causative agents of the common cold and associated upper respiratory tract complications. Since the virus has more than hundred serotypes and previous exposure to rhinovirus gives little immunological protection, which leads to higher rate of infection (Hayden F G. Rhinovirus and the lower respiratory tract. Rev Med Virol. 2004;14(1):17-31). The infection causes short self-limiting illness however, for asthmatics, the elderly and immunocompromised patients, rhinovirus infection can lead to life-threatening complications. The virus is a non enveloped positive strand RNA virus belonging to the family Picornaviridae and has a genome of approx. 7200 nucleotides. The viral genome functions directly as mRNA as soon as it is released into the host cytoplasm (McKnight K L, Lemon S M. The rhinovirus type 14 genome contains an internally located RNA structure that is required for viral replication. RNA;4:1569-84).

[0100] Rhinovirus can be transmitted by aerosol or direct contact. Primary site of inoculation is the nasal mucosa, although the conjunctiva may be involved to a lesser extent (Tan W C. Viruses in asthma exacerbations. Curr Opin Pulm Med. 2005;11:21-6). The virus attaches to respiratory epithelium and spreads locally. The major human receptor for this virus is intercellular adhesion molecule-1 (ICAM-1) (Weinberger M. Respiratory infections and asthma: current treatment strategies. Drug Discov Today. 2004; 9:831-7). Some RV serotypes also up-regulate the ICAM-1 expression on human epithelial cells to increase infection susceptibility (Papi A, Papadopoulos N G, Stanciu L A, Degitz K, Holgate S T, Johnston S L. Effect of desloratadine and loratadine on rhinovirus-induced intercellular adhesion molecule 1 upregulation and promoter activation in respiratory epithelial cells. J Allergy Clin Immunol. 2001;108:221-8). The virus replicates well in the nasal passages and upper tracheobronchial tree but less well in the lower respiratory tract. Incubation period is approximately 2-3 days. Viremia is uncommon but the virus is shed in large amounts. Viral shedding can occur a few days before cold symptoms are recognized by the patient, peaks on days 2-7 of the illness, and may last for as many as 3-4 weeks.

[0101] Rhinovirus infection of upper airway has been linked to asthma exacerbations and studies suggest these are caused by additive or synergistic interactions with allergen exposure or with air pollution (Tan, supra). An impaired antiviral immunity to rhinovirus may lead to impaired viral clearance and hence prolonged symptoms. Th-2 cytokines has been shown to play an important role in upregulation of human rhinovirus receptor and may explain exacerbation of disease in asthmatics following rhinovirus infection (Bianco A, Sethi S K, Allen J T, Knight R A, Spiteri M A. Th2 cytokines exert a dominant influence on epithelial cell expression of the major group human rhinovirus receptor, ICAM-1. Eur Respir J. 1998;12:619-26).

### Dengue Virus

[0102] Dengue is an endemic viral disease affecting tropical and subtropical regions around the world. Dengue fever (DF) and its more serious forms, dengue hemorrhagic fever (DHF) and dengue shock syndrome (DSS), has become important public health problems and has grown dramatically in recent times. The disease is now endemic in more than 100 countries in Africa, the Americas, the eastern Mediterranean, Southeast Asia, and the Western Pacific, threatening more than 2.5 billion people (Gubler, D. J. 1998. Dengue and dengue hemorrhagic fever. Clin. Microbiol. Rev. 11:480-496.). The World Health Organization estimates that there may be 50 million to 100 million cases of dengue virus infections worldwide every year, which result in 250,000 to 500,000 cases of DHF and 24,000 deaths each year (Gibbons, R. V., and D. W. Vaughn. 2002. Dengue: an escalating problem. BMJ 324:1563-1566; World Health Organization. 1997. Dengue haemorrhagic fever: diagnosis, treatment, prevention and control, 2nd ed. World Health Organization, Geneva, Switzerland)

[0103] Dengue virus is a mosquito-borne flavivirus and the most prevalent arbovirus in tropical and subtropical regions of the world (Gubler, D. J. 1997. Dengue and dengue hemorrhagic fever: its history and resurgence as a global public health problem, p. 1-22. In D. J. Gubler and G. Kuno (ed.), Dengue and dengue hemorrhagic fever. CAB International, New York, N.Y.). Dengue virus is a positive-stranded encapsulated RNA virus. The genomic RNA is approximately 11 kb in length and is composed of three structural protein genes that encode the nucleocapsid or core protein (C), a membrane-associated protein (M), an envelope protein (E), and seven nonstructural (NS) protein genes. The proteins are synthesized as a polyprotein of about 3,000 amino acids that is processed cotranslationally and posttranslationally by viral and host proteases (Deubel, V., R. M. Kinney, and D. W. Trent. 1988. Nucleotide sequence and deduced amino acid sequence of the nonstructural proteins of dengue type 2 virus, Jamaica genotype: comparative analysis of the full-length genome. Virology 165:234-244). There are four distinct serotypes, serotypes 1 to 4. Infection with one serotype does not provide protection from the other serotype. Instead, it is generally thought that secondary infection or infection with secondary or multiple infections with various dengue virus serotypes is a major risk factor for DHF-DSS due to antibody-dependent enhancement (Halstead, S. B. 1988. Pathogenesis of dengue: challenge to molecular biology. Science 239:476-481.). At present there is effective vaccine against this virus.

[0104] The virus causes a broad spectrum of illnesses, ranging from inapparent infection, flu-like mild undifferentiated fever, and classical DF to the more severe form, DHF-DSS, from which rates of morbidity and mortality are high (Gubler, D. J. 1998. Dengue and dengue hemorrhagic fever. Clin. Microbiol. Rev. 11:480-496.).

### Double Strand RNA Viruses

[0105] The dsRNA viruses are polyphyletic in origin. Reoviruses are the one of the best-studied dsRNA viruses. Representatives of the family infect plants, animals and insects, and many infect an insect vector as well as an animal or plant alternate host. The viruses all have a double or triple capsid structure, the outer layer of which is stripped off during endocytotic entry. Naked core particles in the cytoplasm are able to transcribe capped and non-polyadenylated genome-segment-length monocistronic mRNAs, via an RNA-dependent RNA polymerase (RdRp) activity associated into the cytoplasm as they are synthesized and are translated. Viral products accumulate as viroplasms: associations of viral structural and polymerase proteins and mRNAs result in assembly of immature particles, inside which mRNAs are transcribed to give negative-stranded RNA molecules with which they become base-paired. The importance of the intermediate and inner capsid proteins are illustrated in the example of rotavirus.

[0106] Double strand RNA viruses useful in the present invention include rotavirus, reovirus, mammalian orthoriovirus, and Colorado tick fever virus. Other suitable double strand RNA viruses are known to those skilled in the art. Genbank Accession numbers for exemplary double strand viral nucleoprotein nucleic acid sequences include K02086 (VP6) and X14942 (VP2).

### Rotavirus

[0107] Rotavirus, a member of the family Reoviridae, is an important cause of acute gastroenteritis in infants and young children (Kapikian, A. Z. 2001, Rotavirus, p. 1787-1833. Fields virology, 4th ed. Lippincott/The Williams & Wilkins Co., Philadelphia, Pa.). The virion is an icosahedron composed of three concentric layers of protein with a genome of 11 segments of double-stranded RNA (dsRNA) (Prasad, B. V. 1988, J. Mol. Biol. 199:269-275). The outer layer of the infectious triple-layered particle (TLP) is made up of the glycoprotein, VP7, and the spike protein, VP4. The intermediate layer is formed by VP6 trimers, and the inner layer is formed by the core lattice protein, VP2. Positioned at the vertices of the VP2 lattice are individual copies of the RNA-dependent RNA polymerase (RdRp) VP1, and the mRNA-capping enzyme VP3 (Lawton, J. A., 1997, J. Virol. 71:7353).

[0108] VP6, forms the intermediate layer of the virus, integrate the two principal functions of the virus, cell entry and endogenous transcription, through its interactions with the outer layer proteins VP7 and VP4, and the inner layer proteins VP4 and VP7, and the inner layer protein VP2. VP6 itself, despite lack of any enymatic functions, is essential for endogenous transcription of the genome. Cryo-EM studies have shown that the nascent mRNA transcripts exit specifically through the type I channels in the VP6 layer (Lawton, J. A., 2000, Adv. Virus Res. 55, 185-229). Mutational analysis based on the pseudo-atomic model of the VP6 layer further demonstrated that the proper assembly of VP6 trimers on VP2 is an absolute requirement for endogenous transcription. The site-specific amino acid substitution partially or completely abolished the transcriptase activity (Charpilienne, A., 2002, J. Virol. 76, 7822-7831). The exit of transcripts through the channels at the capsid layer (equivalent of VP6 layer in rotavirus) appears to be a common theme in dsRNA viruses. Regions in this layer have been shown also function as substrate sinks for the transcription reaction.

[0109] VP2 forms the innermost layer interacting with the VP6 layer on the outside and the genomic RNA on the inside. VP2 exhibits RNA-binding ability through its N-terminal residues. Through this RNA-binding property, VP2 plays an important role in maintaining the appropriate spacing between the RNA strands to allow the genomic RNA to move around the transcription complex during transcription (Pesavento, J. B., 2001, Proc. Natl. Acad. Sci. U.S.A., 98, 1381-1386). Thus, one of the principal functions of the VP2 is to direct the structural organization of the genome that is conductive for its endogenous transcription.

RNA-Inducing Entities—siRNA and shRNA Molecules

[0110] The present invention features siRNA molecules, methods of making siRNA molecules and methods (e.g., prophylactic and/or therapeutic methods and methods for research) for using siRNA molecules. The siRNA molecule can have a length from about 10-60 or more nucleotides (or nucleotide analogs), about 15-25 nucleotides (or nucleotide analogs), or about 19-23 nucleotides (or nucleotide analogs). The siRNA molecule can have nucleotide (or nucleotide analog) lengths of about 10-20, 20-30, 30-40, 40-50, 15, 16, 17, 18, 19, 20, 21, 22, 23, 24, 25, 26, 27, 28, or 29. In a preferred embodiment, the siRNA molecule has a length of 19 nucleotides. It is to be understood that all ranges and values encompassed in the above ranges are within the scope of the present invention. Generally, long dsRNAs (over 60 nucleotides) are less preferable, as they have been found to induce cell death (termed the “interferon response”) in mammalian cells, such as human cells. siRNAs can preferably include 5′ terminal phosphate and a 3′ short overhang of about 1 or 2 nucleotides. In a preferred embodiment, the RNAi-inducing entity can be a short hairpin siRNA (shRNA) or an expressed shRNA. Examples of such shRNAs and methods of manufacturing the same are discussed in the examples. In another embodiment, the siRNA can be associated with one or more proteins in an siRNA complex.

[0111] The siRNA molecules of the invention are provided to reduce viral gene expression in a host cell by, at least in part, binding to target viral transcripts in a manner that results in destruction of the target viral transcript by the host cell machinery. Thus, the siRNA molecules of the invention include a sequence that is sequence sufficiently complementary to a portion of the viral nucleoprotein gene to mediate RNA interference (RNAi), as defined herein, i e., the siRNA has a sequence sufficiently specific to trigger the degradation of the target RNA by the RNAi machinery or process. The siRNA molecule can be designed such that every residue of the antisense strand is complementary to a residue in the target molecule. Alternatively, substitutions can be made within the molecule to increase stability and/or enhance processing activity of said molecule. Substitutions can be made within the strand or can be made to residues at the ends of the strand.

[0112] The target RNA cleavage reaction guided by siRNAs is highly sequence specific. In general, siRNAs containing a nucleotide sequence identical to a portion of the target gene are preferred for inhibition. As the siRNAs of the invention are generally provided as double stranded molecules, identity and complementarily of the antisense strand of the siRNA can be determined relative to the target transcript. Thus, as used herein, disclosure of a nucleic acid sequence that is identical to a portion of a nucleic acid encoding a viral nucleoprotein includes both strands of a double stranded siRNA. However, it is recognized that 100% sequence identity between the siRNA and the target gene is not required to practice the present invention. Thus the invention has the advantage of being able to tolerate sequence variations that might be expected due to genetic mutation, strain polymorphism, or evolutionary divergence. For example, siRNA sequences with insertions, deletions, and single point mutations relative to the target sequence are effective for inhibition. Alternatively, siRNA sequences with nucleotide analog substitutions or insertions are effective for inhibition. Moreover, not all positions of a siRNA contribute equally to target recognition. Mismatches in the center of the siRNA are most critical and can essentially abolish target RNA cleavage. In contrast, the 3′ nucleotides of the siRNA (e.g., the 3′ nucleotides of the siRNA antisense strand) typically do not contribute significantly to specificity of the target recognition. In particular, 3′ residues of the siRNA sequence which are complementary to the target RNA (e.g., the guide sequence) generally are not as critical for target RNA cleavage.

[0113] It is known in the art that not all siRNAs are equally effective in reducing or inhibiting expression of any particular target gene. (See, e.g., Holen, T., et al., Nucleic Acids Res., 30(8):1757-1766, reporting variability in the efficacy of different siRNAs), and a variety of considerations may be employed to increase the likelihood that a selected siRNA may be effective. For example, it may be preferable to select target portions within exons rather than introns. siRNAs may generally be designed in accordance with principles described in Technical Bulletin #003—Revision B, “siRNA Oligonucleotides for RNAi Applications” and Technical Bulletin #4, Dharmacon Research, Inc., Lafayette, Colo. 80026, a commercial supplier of RNA reagents. The RNAi Technical Reference & Application Guide, from Dharmacon, contains a variety of information regarding siRNA design parameters, synthesis, etc., and is incorporated herein by reference. Additional design considerations that may also be employed are described in Semizarov, D., et al., Proc. Natl. Acad. Sci., Vol. 100, No. 11, pp. 6347-6352.

[0114] Sequence identity may be determined by sequence comparison and alignment algorithms known in the art. To determine the percent identity of two nucleic acid sequences (or of two amino acid sequences), the sequences are aligned for optimal comparison purposes (e.g., gaps can be introduced in the first sequence or second sequence for optimal alignment). The nucleotides (or amino acid residues) at corresponding nucleotide (or amino acid) positions are then compared. When a position in the first sequence is occupied by the same residue as the corresponding position in the second sequence, then the molecules are identical at that position. The percent identity between the two sequences is a function of the number of identical positions shared by the sequences (i.e., % homology equals the number of identical positions divided by the total number of positions multiplied by 100), optionally penalizing the score for the number of gaps introduced and/or length of gaps introduced.

[0115] The comparison of sequences and determination of percent identity between two sequences can be accomplished using a mathematical algorithm. In one embodiment, the alignment generated over a certain portion of the sequence aligned having sufficient identity but not over portions having low degree of identity (i.e., a local alignment). A preferred, non-limiting example of a local alignment algorithm utilized for the comparison of sequences is the algorithm of Karlin & Altschul, Proc. Natl. Acad. Sci. USA 87:2264-68 (1990), modified as in Karlin & Altschul, Proc. Natl. Acad. Sci. USA 90:5873-77 (1993). Such an algorithm is incorporated into the BLAST programs (version 2.0) of Altschul, et al., J. Mol. Biol. 215:403-10 (1990). In another embodiment, the alignment is optimized by introducing appropriate gaps and percent identity is determined over the length of the aligned sequences (i. e., a gapped alignment). To obtain gapped alignments for comparison purposes, Gapped BLAST can be utilized as described in Altschul, et al., Nucleic Acids Res. 25(17):3389-3402 (1997). In another embodiment, the alignment is optimized by introducing appropriate gaps and percent identity is determined over the entire length of the sequences aligned (i.e., a global alignment). A so preferred, non-limiting example of a mathematical algorithm utilized for the global comparison of sequences is the algorithm of Myers and Miller, CABIOS (1989). Such an algorithm is incorporated into the ALIGN program (version 2.0) which is part of the GCG sequence alignment software package. When utilizing the ALIGN program for comparing amino acid sequences, a PAM120 weight residue table, a gap length penalty of 12, and a gap penalty of 4 can be used.

[0116] Greater than 80% sequence identity, e.g., 84%, 89%, 91%, 92%, 93%, 94%, 95%, 96%, 97%, 98%, 99% or even 100% sequence identity, between the siRNA (e.g., the antisense strand of the siRNA) and the portion of the target gene is preferred. In the context of an siRNA of about 19-25 nucleotides, e.g., at least 16-21 identical nucleotides are preferred, more preferably at least 17-22 identical nucleotides, and even more preferably at least 18-23 or 19-24 identical nucleotides. Alternatively worded, in an siRNA of about 19-25 nucleotides in length, siRNAs having no greater than about 4 mismatches are preferred, preferably no greater than 3 mismatches, more preferably no greater than 2 mismatches, and even more preferably no greater than 1 mismatch. For example, the siRNA contains an antisense strand having 1, 2, 3 or 4 mismatches with the target sequence.

[0117] Alternatively, the siRNA may be defined functionally as including a nucleotide sequence (or oligonucleotide sequence) that is capable of hybridizing with a portion of the target gene transcript (e.g., 400 mM NaCl, 40 mM PIPES pH 6.4, 1 mM EDTA, 50° C. or 70° C. hybridization for 12-16 hours; followed by washing). Additional preferred hybridization conditions include hybridization at 70° C. in 1×SSC or 50° C. in 1×SSC, 50% formamide followed by washing at 70° C. in 0.3×SSC or hybridization at 70° C. in 4×SSC or 50° C. in 4×SSC, 50% formamide followed by washing at 67° C. in 1×SSC. The hybridization temperature for hybrids anticipated to be less than 50 base pairs in length should be 5-10° C. less than the melting temperature (Tm) of the hybrid, where Tm is determined according to the following equations. For hybrids less than 18 base pairs in length, Tm(° C.)=2(# of A+T bases)+4(# of G+C bases). For hybrids between 18 and 49 base pairs in length, Tm(° C.)=81.5+16.6(log 10[Na+])+0.41(% G+C) (600/N), where N is the number of bases in the hybrid, and [Na+] is the concentration of sodium ions in the hybridization buffer ([Na+] for 1×SSC=0.165 M). Additional examples of stringency conditions for polynucleotide hybridization are provided in Sambrook, J., et al., 1989, Molecular Cloning: A Laboratory Manual, Cold Spring Harbor Laboratory Press, Cold Spring Harbor, N.Y., chapters 9 and 11, and Current Protocols in Molecular Biology, 1995, F. M. Ausubel, et al., eds., John Wiley & Sons, Inc., sections 2.10 and 6.3-6.4, incorporated herein by reference. The length of the identical nucleotide sequences may be at least about 10, 12, 15, 17, 20, 22, 25, 27, 30, 32, 35, 37, 40, 42, 45, 47 or 50 bases.

[0118] In one embodiment, the RNA molecules of the present invention are modified, such as to improve stability in serum or in growth medium for cell cultures. In order to enhance the stability, the 3′-residues may be stabilized against degradation, e.g., they may be selected such that they consist of purine nucleotides, e.g., adenosine or guanosine nucleotides. Alternatively, substitution of pyrimidine nucleotides by modified analogues, e.g., substitution of uridine by 2′-deoxythymidine is tolerated and does not affect the efficiency of RNA interference. For example, the absence of a 2′ hydroxyl may significantly enhance the nuclease resistance of the siRNAs in tissue culture medium.

[0119] In a preferred embodiment of the present invention the RNA molecule may contain at least one modified nucleotide analogue (or analog). The nucleotide analogues may be located at positions where the target-specific activity, e.g., the RNAi mediating activity is not substantially affected, e.g., in a region at the 5′-end and/or the 3′-end of the RNA molecule. Particularly, the ends may be stabilized by incorporating modified nucleotide analogues. Preferred nucleotide analogues include sugar- and/or backbone-modified ribonucleotides (i.e., include modifications to the phosphate-sugar backbone). For example, the phosphodiester linkages of natural RNA may be modified to include at least one of a nitrogen or sulfur heteroatom. In preferred backbone-modified ribonucleotides the phosphoester group connecting to adjacent ribonucleotides is replaced by a modified group, e.g., of phosphorothioate group. In preferred sugar-modified ribonucleotides, the 2′ OH-group is replaced by a group selected from H, OR, R, halo, SH, SR, NH₂, NHR, NR₂ or ON, wherein R is C₁-C₆ alkyl, alkenyl or alkynyl and halo is F, Cl, Br or I.

[0120] Also preferred are nucleobase-modified ribonucleotides, i.e., ribonucleotides containing at least one non-naturally occurring nucleobase instead of a naturally occurring nucleobase. Bases may be modified to block the activity of adenosine deaminase. Exemplary modified nucleobases include, but are not limited to, uridine and/or cytidine modified at the 5-position, e.g., 5-(2-amino)propyl uridine, 5-bromo uridine; adenosine and/or guanosines modified at the 8 position, e.g., 8-bromo guanosine; deaza nucleotides, e.g., 7-deaza-adenosine; O— and N-alkylated nucleotides, e.g., N6-methyl adenosine are suitable. It should be noted that the above modifications may be combined.

[0121] In some embodiments, the siRNA can be modified by the substitution of at least one nucleotide with a modified nucleotide. The siRNA can have one or more mismatches when compared to the target sequence of the nucleoprotein transcript and still mediate RNAi as demonstrated in the examples below.

[0122] The ability of the nucleoprotein-directed siRNAs of the present invention to mediate RNAi is particularly advantageous considering the rapid mutation rate of some of the genes of the viruses provided herein, such as genes of an influenza virus. The inventors provide for the use of the nucleoprotein gene as an RNAi target as the inventors have recognized that the nucleoprotein gene generally has a lower rate of mutations as compared to other viral genes. Moreover, in embodiments of the invention, siRNAs are targeted towards conserved regions of the viral nucleoprotein gene. The invention contemplates several embodiments which further leverage this ability by, e.g., synthesizing patient-specific siRNAs or plasmids, and/or introducing several siRNAs staggered along the nucleoprotein gene. In one embodiment, highly and/or moderately conserved regions of the nucleoprotein gene are targeted as discussed in greater detail below. In other embodiments, a biological sample is obtained from a subject. As used herein, a biological sample is any material obtained from the subject containing a viral nucleic acid. For example, one or more of a host subject's infected cells are procured and the genome of the viral nucleoprotein gene within it sequenced or otherwise analyzed to select or synthesize one or more corresponding siRNAs, plasmids or transgenes.

Manufacture of siRNA

[0123] In one embodiment, siRNAs are synthesized either in vivo or in vitro. Endogenous RNA polymerase of the cell may mediate transcription in vivo, or cloned RNA polymerase can be used for transcription in vivo or in vitro. For transcription from a transgene in vivo or an expression construct, a regulatory region (e.g., promoter, enhancer, silencer, or splice donor and acceptor) may be used to transcribe the siRNA. Inhibition may be targeted by specific transcription in an organ, tissue, or cell type; stimulation of an environmental condition (e.g., infection, stress, temperature, chemical inducers); and/or engineering transcription at a developmental stage or age. A transgenic organism that expresses siRNA from a recombinant construct may be produced by introducing the construct into a zygote, an embryonic stem cell, or another multipotent cell derived from the appropriate organism.

[0124] In addition, not only can an siRNA be used to cleave multiple RNAs within the cell, but the siRNAs can be replicated and amplified within a cell by the host cell enzymes. Alberts, et al., The Cell 452 (4th Ed. 2002).

[0125] RNA may be produced enzymatically or by partial/total organic synthesis, any modified ribonucleotide can be introduced by in vitro enzymatic or organic synthesis. In one embodiment, a siRNA is prepared chemically. Methods of synthesizing RNA molecules are known in the art, in particular, the chemical synthesis methods as de scribed in Verma and Eckstein, Annul Rev. Biochem. 67:99-134 (1998). In another embodiment, a siRNA is prepared enzymatically. For example, a siRNA can be prepared by enzymatic processing of a long dsRNA having sufficient complementarity to the desired target RNA. Processing of long dsRNA can be accomplished in vitro, for example, using appropriate cellular lysates and ds-siRNAs can be subsequently purified by gel electrophoresis or gel filtration. In an exemplary embodiment, RNA can be purified from a mixture by extraction with a solvent or resin, precipitation, electrophoresis, chromatography, or a combination thereof. Alternatively, the RNA may be used with no or a minimum of purification to avoid losses due to sample processing.

[0126] The siRNAs can also be prepared by enzymatic transcription from synthetic DNA templates or from DNA plasmids isolated from recombinant bacteria. Typically, phage RNA polymerases are used such as T7, T3 or SP6 RNA polymerase (Milligan & Uhlenbeck, Methods Enzymol. 180:51-62 (1989)). The RNA may be dried for storage or dissolved in an aqueous solution. The solution may contain buffers or salts to inhibit annealing, and/or promote stabilization of the single strands.

siRNA Vectors

[0127] Another aspect of the present invention includes a vector that expresses one or more siRNAs that include sequences sufficiently complementary to a portion of the nucleoprotein gene genome to mediate RNAi. The vector can be administered in vivo to thereby initiate RNAi therapeutically or prophylactically by expression of one or more copies of the siRNAs. In one embodiment, synthetic shRNA is expressed in a plasmid vector. In another, the plasmid is replicated in vivo. In another embodiment, the vector can be a viral vector, e.g., a retroviral vector. Examples of such plasmids and methods of making the same are illustrated in the examples. Use of vectors and plasmids are advantageous because the vectors can be more stable than synthetic siRNAs and thus effect long-term expression of the siRNAs.

[0128] Some target viruses mutate rapidly and may result in a mismatch of even one nucleotide that can, in some instances, impede RNAi. Accordingly, in one embodiment, a vector is contemplated that expresses a plurality of siRNAs to increase the probability of sufficient homology to mediate RNAi. Preferably, these siRNAs are staggered along the nucleoprotein gene, or are clustered in one region of the nucleoprotein gene. For example, a plurality of siRNAs is directed towards a region of the nucleoprotein gene that is about 200 nucleotides in length and contains the 3′ end of the nucleoprotein gene. In one embodiment, one or more of the siRNAs expressed by the vector is a shRNA. The siRNAs can be staggered along one portion of the nucleoprotein gene or target different portions of the nucleoprotein gene. In one embodiment, the vector encodes about 3 siRNAs, more preferably about 5 siRNAs. The siRNAs can be targeted to conserved regions of the nucleoprotein gene.

### Methods of Introducing RNAs, Vectors, and Host Cells

[0129] Physical methods of introducing the agents of the present invention (e.g., siRNAs, vectors, or transgenes) include injection of a solution containing the agent, bombardment by particles covered by the agent, soaking the cell or organism in a solution of the agent, or electroporation of cell membranes in the presence of the agent. A viral construct packaged into a viral particle would accomplish both efficient introduction of an expression construct into the cell and transcription of RNA, including siRNAs, encoded by the expression construct. Other methods known in the art for introducing nucleic acids to cells may be used, such as lipid-mediated carrier transport, chemical-mediated transport, such as calcium phosphate, and the like. Thus the siRNA may be introduced along with components that perform one or more of activities, e.g., enhance siRNA uptake by the cell, inhibit annealing of the two siRNA strands to each other, stabilize the single strands, or otherwise increase inhibition of the target gene.

[0130] The agents may be directly introduced into the cell (i e., intracellularly); or introduced extracellularly into a cavity, interstitial space, into the circulation of an organism, introduced orally, by inhalation, or may be introduced by bathing a cell or organism in a solution containing the RNA. Vascular or extravascular circulation, the blood or lymph system, and the cerebrospinal fluid are sites where the agent may be introduced.

[0131] Cells may be infected with a target virus upon delivery of the agent or exposed to the target virus after delivery of agent. The cells may be derived from or contained in any organism. The cell may be from the germ line, somatic, totipotent or pluripotent, dividing or non-dividing, parenchyma or epithelium, immortalized or transformed, or the like. The cell may be a stem cell, or a differentiated cell.

[0132] Depending on the particular target gene and the dose of double stranded RNA material delivered, this process may provide partial or complete loss of function for the target gene. A reduction or loss of gene expression in at least 50%, 60%, 70%, 80%, 90%, 95% or 99% or more of targeted cells is exemplary. Inhibition of gene expression refers to the absence (or observable decrease) in the level of viral protein, RNA, and/or DNA. Specificity refers to the ability to inhibit the target gene without manifesting effects on other genes, particularly those of the host cell. The consequences of inhibition can be confirmed by examination of the outward properties of the cell or organism or by biochemical techniques such as RNA solution hybridization, nuclease protection, Northern hybridization, reverse transcription gene expression monitoring with a microarray, antibody binding, enzyme linked immunosorbent assay (ELISA), integration assay, Western blotting, radioimmunoassay (RIA), other immunoassays, and fluorescence activated cell analysis (FACS).

[0133] For RNA-mediated inhibition in a cell line or whole organism, gene expression is conveniently assayed by use of a reporter or drug resistance gene whose protein product is easily assayed. Such reporter genes include acetohydroxyacid synthase (AHAS), alkaline phosphatase (AP), beta galactosidase (LacZ), beta glucoronidase (GUS), chloramphenicol acetyltransferase (CAT), green fluorescent protein (GFP), horseradish peroxidase (HRP), luciferase (Luc), nopaline synthase (NOS), octopine synthase (OCS), and derivatives thereof. Multiple selectable markers are available that confer resistance to ampicillin, bleomycin, chloramphenicol, gentarnycin, hygromycin, kanamycin, lincomycin, methotrexate, phosphinothricin, puromycin, and tetracyclin. Depending on the assay, quantitation of the amount of gene expression allows one to determine a degree of inhibition which is greater than 10%, 33%, 50%, 90%, 95% or 99% as compared to a cell not treated according to the present invention. Lower doses of injected material and longer times after administration of siRNA may result in inhibition in a smaller fraction of cells (e.g., at least 10%, 20%, 50%, 75%, 90%, or 95% of targeted cells).

[0134] Quantitation of gene expression in a cell may show similar amounts of inhibition at the level of accumulation of target RNA or translation of target protein. As an example, the efficiency of inhibition may be determined by assessing the amount of gene product in the cell; RNA may be detected with a hybridization probe having a nucleotide sequence outside the region used for the inhibitory double-stranded RNA, or translated polypeptide may be detected with an antibody raised against the polypeptide sequence of that region.

[0135] The siRNA may be introduced in an amount that allows delivery of at least one copy per cell. Higher doses (e.g., at least 5, 10, 100, 500 or 1000 copies per cell) of material may yield more effective inhibition; lower doses may also be useful for specific applications.

### Diagnostic Methods and Kits

[0136] The invention encompasses the recognition that RNAi-based therapy of infectious diseases, e.g., infections caused by a virus, can desirably incorporate a diagnostic step that determines whether a subject in need of treatment is infected with an infectious agent that is susceptible to inhibition by one or more RNAi-inducing entities. By “susceptible to inhibition” is meant that one or more biological activities of the infectious agent can be effectively inhibited by administration of the RNAi-inducing entity to a subject. Preferably replication, pathogenicity, spread, and/or production of the infectious agent are inhibited. For example, preferably replication, pathogenicity, spread, or production of the agent is inhibited by at least 25% when the RNAi-inducing entity is administered to a subject at a tolerated dose. Preferably the inhibition is sufficient to produce a therapeutically useful effect.

[0137] Influenza virus is used as a non-limiting example to illustrate the diagnostic methods of the invention, which are tailored to allow the selection of an RNAi-inducing entity that is suitable for a subject suffering from an infection. However, it is understood that the methods disclosed herein are appropriate to any virus described herein or any virus that would be recognized by one skilled in the art. The selected RNAi-inducing entity may, of course, also be administered for prophylaxis, e.g., to individuals who have come in contact with the infected individual, regardless of whether those individuals have developed symptoms of infection.

[0138] The invention therefore provides methods for diagnosing virus infection and for determining whether a subject is infected with a virus. In certain embodiments the method comprises determining whether a subject is infected with a virus that is inhibited by one or more of the RNAi-inducing entities of the invention that target a viral nucleoprotein transcript. For example, a sample (e.g., sputum, saliva, nasal washings, nasal swab, throat swab, bronchial washings, broncheal alveolar lavage (BAL) fluid, biopsy specimens, etc.) is obtained from a subject who may be suspected of having a viral infection, e.g., influenza. The sample can be subjected to one or more processing steps. Any such processed sample is considered to be obtained from the subject. The sample is analyzed to determine whether it contains a virus-specific nucleic acid, particularly a nucleoprotein transcript. A “virus-specific nucleic acid” is any nucleic acid, or its complement, that originates from or is derived from a virus and can serve as an indication of the presence of a virus in a sample and, optionally, be used to identify the strain and/or the sequence of a viral gene. The nucleic acid may have been subjected to processing steps following its isolation. For example, it may be reverse transcribed, amplified, cleaved, etc. In certain embodiments the sequence of a virus-specific nucleic acid present in the sample, or its complement, is compared with the sequence of the antisense or sense strand of an RNAi-inducing agent such as an siRNA or shRNA. The word “comparison” is used in a broad sense to refer to any method by which a sequence can be evaluated, e.g., which it can be determined whether the sequence is the same as or different to a reference sequence at one or more positions, or by which the extent of difference can be assessed.

[0139] Any of a wide variety of nucleic acid-based assays can be used. In certain embodiments the diagnostic assay utilizes a nucleic acid comprising a favorably and/or highly conserved target portion or its complement, or a fragment of the favorably and/or highly conserved portion or its complement. In certain embodiments the nucleic acid serves as an amplification primer or a hybridization probe, e.g., in an assay such as those described below.

[0140] In certain embodiments an influenza-specific nucleic acid in the sample is amplified. Isothermal target amplification methods include transcription mediated amplification (TMA), self-sustained sequence replication (3SR), Nucleic Acid Sequence Based Amplification (NASBA), and variations thereof. Detection or comparison can be performed using any of a variety of methods known in the art, e.g., amplification-based assays, hybridization assays, primer extension assays (e.g., allele-specific primer extension in which the corresponding target portions of different influenza virus strains are analogous to different alleles of a gene), oligonucleotide ligation assays (U.S. Pat. Nos. 5,185,243, 5,679,524 and 5,573,907), cleavage assays, heteroduplex tracking analysis (HTA) assays, etc. Examples include the Taqman® assay, Applied Biosystems (U.S. Pat. No. 5,723,591). Cycling probe technology (CPT), which is a nucleic acid detection system based on signal or probe amplification rather than target amplification (U.S. Pat. Nos. 5,011,769, 5,403,711, 5,660,988, and 4,876,187), could also be employed. Invasive cleavage assays, e.g., Invader® assays (Third Wave Technologies), described in Eis, P. S. et al., Nat. Biotechnol. 19:673, 2001, can also be used to detect influenza-specific nucleic acids. Assays based on molecular beacons (U.S. Pat. Nos. 6,277,607; 6,150,097; 6,037,130) or fluorescence energy transfer (FRET) may be used. Molecular beacons are oligonucleotide hairpins which undergo a conformational change upon binding to a perfectly matched template.

[0141] In certain embodiments the assay determines whether an influenza-specific nucleic acid in the sample comprises a portion that is identical to or different from a sense or antisense strand of an RNAi-inducing entity. Optionally the exact differences, if any, are identified. This information is used to determine whether the influenza virus is susceptible to inhibition by the RNAi-inducing entity. In addition to those discussed above, suitable assays for detection and/or genotyping of infectious agents are described in Molecular Microbiology: Diagnostic Principles and Practice, Persing, D. H., et al., (eds.) Washington, D.C.: ASM Press, 2004.

[0142] The diagnostic assays may employ any of the nucleic acids described herein. In certain embodiments of the invention the nucleic acid comprises a nucleic acid portion that is not substantially complementary or substantially identical to a nucleoprotein transcript. For example, the nucleic acid may comprise a primer binding site (e.g., a binding site for a universal sequencing primer or amplification primer), a hybridization tag (which may, for example, be used to isolate the nucleic acid from a sample comprising other nucleic acids), etc. In certain embodiments of the invention the nucleic acid comprises a non-nucleotide moiety. The non-nucleotide moiety may be attached to a terminal nucleotide of the nucleic acid, e.g., at the 3′ end. The moiety may protect the nucleic acid from degradation. In certain embodiments the non-nucleotide moiety is a detectable moiety such as a fluorescent dye, radioactive atom, member of a fluorescence energy transfer (FRET) pair, quencher, etc. In certain embodiments the non-nucleotide moiety is a binding moiety, e.g. biotin or avidin. In certain embodiments the non-nucleotide moiety is a hapten such as digoxygenin, 2,4-Dinitrophenyl (TEG), etc. In certain embodiments the non-nucleotide moiety is a tag usable for isolation of the nucleic acid.

[0143] In certain embodiments of the invention a nucleic acid is attached to a support, e.g., a microparticle such as a bead, which is optionally magnetic. The invention further provides an array comprising a multiplicity of nucleic acids of the invention, e.g., at least 10, 20, 50, etc. The nucleic acids are covalently or noncovalently attached to a support, e.g., a substantially planar support such as a glass slide. See, e.g., U.S. Pat. Nos. 5,744,305; 5,800,992; 6,646,243.

[0144] Information obtained from experiments or from previous experience in treating a virus having a particular sequence within the nucleoprotein gene can also be used to decide whether the virus is susceptible to inhibition by a given RNAi-inducing entity or combination thereof. Susceptibility information can also include theoretical predictions based, for example, on the expected effect of any mismatches that exist between the nucleoprotein virus sequence and the antisense strand of an inhibitory agent.

[0145] The invention provides diagnostic kits for detecting virus infection. Certain of the kits comprise one or more nucleic acids of the invention. Certain of the kits comprise one or more nucleic acids that can be used to detect a portion of an nucleoprotein virus transcript that comprises a preferred target portion for RNAi. The kits may comprise one or more items selected from the group consisting of: a probe, a primer, a sequence-specific oligonucleotide, an enzyme, a substrate, an antibody, a population of nucleotides, a buffer, a positive control, and a negative control. The nucleotides may be labeled. For example, one or more populations of fluorescently labeled nucleotides such as dNTPs, ddNTPs, etc. may be provided.

[0146] The probe can be a nucleic acid that includes all or part of a target portion, e.g., a highly or favorably conserved nucleoprotein target portion, or its complement, or is at least 80% identical or complementary to a target portion, e.g., 100% identical or complementary. In certain embodiments a plurality of probes are provided. The probes differ at one or more positions and can be used for determining the exact sequence of a nucleoprotein virus transcript at such positions. For example, the probes may differentially hybridize to the transcript (e.g., hybridization occurs only if the probe is 100% complementary to a target portion of the transcript). Kits of the invention can comprise specimen collection materials, e.g., a swab, a tube, etc. The components of the kit may be packaged in individual vessels or tubes which will generally be provided in a container, e.g., a plastic or styrofoam container suitable for commercial sale, together with instructions for use of the kit.

### Methods of Treatment

[0147] The present invention provides for both prophylactic and therapeutic methods for treating a subject at risk of (or susceptible to) or a subject having a virus. “Treatment”, or “treating” as used herein, is defined as the application or administration of a therapeutic agent (e.g., a siRNA or vector or transgene encoding same) to a patient, or application or administration of a therapeutic agent to an isolated tissue or cell line from a patient, who has a virus with the purpose to cure, heal, alleviate, relieve, alter, remedy, ameliorate, improve or affect the virus, or symptoms of the virus. The term “treatment” or “treating” is also used herein in the context of administering agents prophylactically, e.g., to inoculate against a virus.

[0148] With regards to both prophylactic and therapeutic methods of treatment, such treatments may be specifically tailored or modified, based on knowledge obtained from the field of pharmacogenomics. “Pharmacogenomics”, as used herein, refers to the application of genomics technologies such as gene sequencing, statistical genetics, and gene expression analysis to drugs in clinical development and on the market. More specifically, the term refers the study of how a patient's genes determine his or her response to a drug (e.g., a patient's “drug response phenotype”, or “drug response genotype”). Thus, another aspect of the invention provides methods for tailoring an individual's prophylactic or therapeutic treatment with either the target gene molecules of the present invention or target gene modulators according to that individual's drug response genotype.

[0149] In related embodiments, a population of two or more different RNAi-inducing agents are administered to a subject, who may be a host to a virus. In one embodiment, the population of two or more RNAi-inducing agents include agents that contain guide strands whose sequences are substantially complementary (preferably 100% complementary) to the same highly conserved region from a variety of strains of a particular virus. In another embodiment, the population of two or more RNAi-inducing agents includes agents that contain guide strands whose sequences are substantially complementary (preferably 100% complementary) to different highly conserved regions from the same virus strain. In yet another embodiment, the population of two or more RNAi-inducing agents include agents that contain guide strands whose sequences are substantially complementary (preferably 100% complementary) to the same highly conserved region from a variety of strains of a particular virus, e.g., an influenza virus and RNAi-inducing agents includes agents that contain guide strands whose sequences are substantially complementary (preferably 100% complementary) to different highly conserved regions from the same virus strain.

### Prophylactic Methods

[0150] In one aspect, the invention provides a method for preventing in a subject, infection with a virus or a condition associated with a viral infection, by administering to the subject a prophylactically effective agent that includes any of the siRNAs or vectors or transgenes discussed herein. Administration of a prophylactic agent can occur prior to the manifestation of symptoms characteristic of a viral infection, such that the viral infection is prevented.

[0151] In a preferred embodiment, the prophylactically effective agent is administered to the subject prior to exposure to the target virus. In another embodiment, the agent is administered to the subject after exposure to the target virus to delay or inhibit its progression, or prevent its integration into the DNA of healthy cells or cells that do not contain a provirus. Preferably, target virus formation is inhibited or prevented. Additionally or alternatively, it is preferable that target virus replication is inhibited or prevented. In one embodiment, the siRNA degrades the target virus RNA in the early stages of its replication, for example, immediately upon entry into the cell. In this manner, the agent can prevent healthy cells in a subject from becoming infected. In another embodiment, the siRNA degrades the viral mRNA in the late stages of replication. Any of the strategies discussed herein can be employed in these methods, such as administration of a vector that expresses a plurality of siRNAs sufficiently complementary to the viral nucleoprotein gene to mediate RNAi.

### Therapeutic Methods

[0152] Another aspect of the invention pertains to methods of modulating target gene expression, protein expression or activity for therapeutic purposes. Accordingly, in an exemplary embodiment, the modulatory method of the invention involves contacting a cell infected with the virus with a therapeutic agent (e.g., a siRNA or vector or transgene encoding same) that is specific for a portion of the viral genome such that RNAi is mediated. These modulatory methods can be performed ex vivo (e.g., by culturing the cell with the agent) or, alternatively, in vivo (e.g., by administering the agent to a subject). The methods can be performed ex vivo and then the products introduced to a subject (e.g., gene therapy).

[0153] The therapeutic methods of the invention generally include initiating RNAi by administering the agent to a subject infected with the virus (e.g., influenza). The agent can include one or more siRNAs, one or more siRNA complexes, vectors that express one or more siRNAs (including shRNAs), or transgenes that encode one or more siRNAs. The therapeutic methods of the invention are capable of reducing viral production (e.g., viral titer or provirus titer), by about 30-50-fold, preferably by about 60-80-fold, and more preferably about (or at least) 90-fold, 100-fold, 200-fold, 300-fold, 400-fold, 500-fold or 1000-fold.

[0154] Additionally, the therapeutic agents and methods of the present invention can be used in co-therapy with post-transcriptional approaches (e.g., with ribozymes and/or antisense siRNAs).

### Dual Prophylactic and Therapeutic Methods

[0155] In a preferred method, a two-pronged attack on the target virus is effected in a subject that has been exposed to the target virus. An infected subject can thus be treated both prophylactically and therapeutically by degrading the virus during early stages of replication and prior to integration into the host cell genome, and also retards replication of the virus in cells in which the target virus has already begun to replicate.

[0156] One skilled in the art can readily determine the appropriate dose, schedule, and method of administration for the exact formulation of the composition being used, in order to achieve the desired “effective level” in the individual patient. One skilled in the art also can readily determine and use an appropriate indicator of the “effective level” of the compounds of the present invention by a direct (e.g., analytical chemical analysis) or indirect (e.g., with surrogate indicators of viral infection) analysis of appropriate patient samples (e.g., blood and/or tissues).

[0157] The prophylactic or therapeutic pharmaceutical compositions of the present invention can contain other pharmaceuticals, in conjunction with a vector according to the invention, when used to therapeutically treat viral infections. Further representative examples of these additional pharmaceuticals that can be used in addition to those previously described, include antiviral compounds, immunomodulators, immunostimulants, antibiotics, and other agents and treatment regimes (including those recognized as alternative medicine) that can be employed to treat viral infections. Immunomodulators and immunostimulants include, but are not limited to, various interleukins, CD4, cytokines, antibody preparations, blood transfusions, and cell transfusions.

### Pharmaceutical Compositions

[0158] The invention pertains to uses of the above-described RNAi-inducing entities for the prophylactic and therapeutic treatments of viral infection, as described infra. Accordingly, the agents of the present invention can be incorporated into pharmaceutical compositions suitable for administration. Such compositions typically comprise the agent and a pharmaceutically acceptable carrier.

[0159] A pharmaceutical composition of the invention is formulated to be compatible with its intended route of administration. Examples of routes of administration include oral, by inhalation, intranasal, parenteral (e.g., intravenous, intradermal, subcutaneous, intraperitoneal, and intramuscular), transdermal (topical), and transmucosal administration. Solutions or suspensions used for parenteral, intradermal, or subcutaneous application can include the following components: a sterile diluent such as water for injection, saline solution, fixed oils, polyethylene glycols, glycerine, propylene glycol or other synthetic solvents; antibacterial agents such as benzyl alcohol or methyl parabens; antioxidants such as ascorbic acid or sodium bisulfite; chelating agents such as ethylenediaminetetraacetic acid (EDTA); buffers such as acetates, citrates or phosphates and agents for the adjustment of tonicity such as sodium chloride or dextrose. pH can be adjusted with acids or bases, such as hydrochloric acid or sodium hydroxide. The parenteral preparation can be enclosed in ampoules, disposable syringes or multiple dose vials made of glass or plastic.

[0160] Pharmaceutical compositions suitable for injectable use include sterile aqueous solutions (where water soluble) or dispersions and sterile powders for the extemporaneous preparation of sterile injectable solutions or dispersion. For intravenous administration, suitable carriers include physiological saline, bacteriostatic water, Cremophor EL™ (BASF, Parsippany, N.J.) or phosphate buffered saline (PBS). In all cases, the composition must be sterile and should be fluid to the extent that easy syringability exists. It must be stable under the conditions of manufacture and storage and must be preserved against the contaminating action of microorganisms such as bacteria and fungi. The carrier can be a solvent or dispersion medium containing, for example, water, ethanol, polyol (e.g., glycerol, propylene glycol, and liquid polyetheylene glycol, and the like), and suitable mixtures thereof. The proper fluidity can be maintained, e.g., by the use of a coating such as lecithin, by the maintenance of the required particle size in the case of dispersion and by the use of surfactants. Prevention of the action of microorganisms can be achieved by various antibacterial and antifungal agents (e.g., parabens, chlorobutanol, phenol, ascorbic acid, thimerosal, and the like). In many cases, it will be preferable to include isotonic agents (e.g., sugars, polyalcohols such as manitol, sorbitol, and sodium chloride) in the composition. Prolonged absorption of the injectable compositions can be brought about by including in the composition an agent that delays absorption (e.g., aluminum monostearate and gelatin).

[0161] Sterile injectable solutions can be prepared by incorporating the active compound in the required amount in an appropriate solvent with one or a combination of ingredients enumerated above, as required, followed by filtered sterilization. Generally, dispersions are prepared by incorporating the active compound into a sterile vehicle which contains a basic dispersion medium and the required other ingredients from those enumerated above. In the case of sterile powders for the preparation of sterile injectable solutions, the preferred methods of preparation are vacuum drying and freeze-drying which yields a powder of the active ingredient plus any additional desired ingredient from a previously sterile-filtered solution thereof.

[0162] Inhalational administration means the RNAi-inducing entity is introduced directly to the respiratory system by inhalation through the nose or mouth and into the lungs. The entity is in naked form or with a delivery agent In certain embodiments the RNAi-inducing agent is administered in an amount effective to treat or prevent a condition that affects the respiratory system, such as a respiratory virus infection, while resulting in minimal absorption into the blood and thus minimal systemic delivery of the RNAi-inducing agent. In particular, the invention provides dry powder compositions containing RNAi-inducing entities that are preferably delivered in the form of an aerosol spray from a pressured container or dispenser which contains a suitable propellant, e.g., a gas such as carbon dioxide, or a nebulizer. In certain embodiments the delivery system is suitable for delivering the composition into major airways (trachea and bronchi) of a subject (e.g., an animal or human) and/or deeper into the lung (bronchioles and/or alveoli). The present invention also includes delivery of compositions comprising an RNAi-inducing entity using a nasal spray. According to certain embodiments of the invention delivery agents to facilitate nucleic acid uptake by cells in the respiratory system are included in the pharmaceutical composition. However, the inventors have also discovered that RNAi-inducing agents can effectively inhibit influenza virus when delivered to the respiratory system via the respiratory passages in the absence of specific delivery agents. For example, RNAi-inducing agents can be delivered to the lungs as a composition that consists essentially of the RNAi-inducing agent in dry form (e.g., dry powder) or in an aqueous medium that consists essentially of water, optionally also including a salt (e.g., NaCl, a phosphate salt), buffer, and/or an alcohol, e.g., as naked siRNA or shRNA.

[0163] The invention also provides means of systemic circulatory delivery of an RNAi-inducing entity by the pulmonary circulation. For a respiratory disease it is preferable to have minimal transfer to the circulation.

[0164] Oral compositions generally include an inert diluent or an edible carrier. They can be enclosed in gelatin capsules or compressed into tablets. For the purpose of oral therapeutic administration, the active compound can be incorporated with excipients and used in the form of so tablets, troches, or capsules. Oral compositions can also be prepared using a fluid carrier for use as a mouthwash, wherein the compound in the fluid carrier is applied orally and swished and expectorated or swallowed. Pharmaceutically compatible binding agents, and/or adjuvant materials can be included as part of the composition. The tablets, pills, capsules, troches and the like can contain any of the following ingredients, or compounds of a similar nature: a binder such as microcrystalline cellulose, gum tragacanth or gelatin; an excipient such as starch or lactose, a disintegrating agent such as alginic acid, Primogel, or corn starch; a lubricant such as magnesium stearate or Sterotes; a glidant such as colloidal silicon dioxide; a sweetening agent such as sucrose or saccharin; or a flavoring agent such as peppermint, methyl salicylate, or orange flavoring.

[0165] Systemic administration can also be by transmucosal or transdermal means. For transmucosal or transdermal administration, penetrants appropriate to the barrier to be permeated are used in the formulation. Such penetrants are generally known in the art, and include, for example, for transmucosal administration, detergents, bile salts, and fusidic acid derivatives. Transmucosal administration can be accomplished through the use of nasal sprays or suppositories. For transdermal administration, the active compounds are formulated into ointments, salves, gels, or creams as generally known in the art.

[0166] In one embodiment, the active compounds are prepared with carriers that will protect the compound against rapid elimination from the body, such as a controlled release formulation, including implants and microencapsulated delivery systems. Biodegradable, biocompatible polymers can be used, such as ethylene vinyl acetate, polyanhydrides, polyglycolic acid, collagen, polyorthoesters, and polylactic acid. Methods for preparation of such formulations will be apparent to those skilled in the art. The materials can also be obtained commercially from Alza Corporation and Nova Pharmaceuticals, Inc. Liposomal suspensions (including liposomes targeted to infected cells with monoclonal antibodies to viral antigens) can also be used as pharmaceutically acceptable carriers. These can be prepared according to methods known to those skilled in the art, for example, as described in U.S. Pat. No. 4,522,811.

[0167] It is especially advantageous to formulate inhalational, oral or parenteral compositions in dosage unit form for ease of administration and uniformity of dosage. Dosage unit form as used herein refers to physically discrete units suited as unitary dosages for the subject to be treated; each unit containing a predetermined quantity of active compound calculated to produce the desired therapeutic effect in association with the required pharmaceutical carrier. The specification for the dosage unit forms of the invention are dictated by and directly dependent on the unique characteristics of the active compound and the particular therapeutic effect to be achieved, and the limitations inherent in the art of compounding such an active compound for the treatment of individuals.

[0168] Toxicity and therapeutic efficacy of such compounds can be determined by standard pharmaceutical procedures in cell cultures or experimental animals, e.g., for determining the LD50 (the dose lethal to 50% of the population) and the ED50 (the dose therapeutically effective in 50% of the population). The dose ratio between toxic and therapeutic effects is the therapeutic index and it can be expressed as the ratio LD50/ED50. Compounds that exhibit large therapeutic indices are preferred. Although compounds that exhibit toxic side effects may be used, care should be taken to design a delivery system that targets such compounds to the site of affected tissue in order to minimize potential damage to uninfected cells and, thereby, reduce side effects.

[0169] The data obtained from the cell culture assays and animal studies can be used in formulating a range of dosage for use in humans. The dosage of such compounds lies preferably within a range of circulating concentrations that include the ED50 with little or no toxicity. The dosage may vary within this range depending upon the dosage form employed and the route of administration utilized. For any compound used in the method of the invention, the therapeutically effective dose can be estimated initially from cell culture or non-human animal assays. A dose may be formulated in animal models to achieve a circulating plasma concentration range that includes the EC50 (i.e., the concentration of the test compound which achieves a half-maximal response) as determined in cell culture. Such information can be used to more accurately determine useful doses in humans. Levels in plasma may be measured, for example, by high performance liquid chromatography.

[0170] The pharmaceutical compositions can be included in a container, pack, or dispenser together with instructions for administration.

### EXAMPLES

### Example 1

### Identification of Viral Nucleoproteins

[0171] Highly conserved sites are considered to be those sites or sequences that are found to be present in a majority of all the available human influenza sequences. Variants are identified that are 19-mer sequences in human influenza isolates that are similar to the conserved 19-mer sequences, but that differ by only one or a few nucleotide changes. These are important since RISC (RNA Induced Silencing Complex) can still initiate RNAi activity using an siRNA duplex whose guide (antisense) strand is largely complementary to the target mRNA sequence, but that has one or a few nucleotide changes relative to exact complementarity.

[0172] There are eight separate RNA segments that compose the influenza viral genome. All analyses were done separately for each of the viral segments. Thus, for example, a search for conserved sites was performed for viral segment #1 using only sequences obtained from segment #1.

[0173] Influenza A viral sequences from each of the eight viral segments was obtained from the Influenza Sequence Database (Macken, C., Lu, H., Goodman, J., & Boykin, L., “The value of a database in surveillance and vaccine selection.” in Options for the Control of Influenza IV. A. D. M. E. Osterhaus, N. Cox & A. W. Hampson (Eds.) Amsterdam: Elsevier Science, 2001, 103-106). The list was screened to remove all but full-length sequences (those with the designation “Complete Cds”, or those having a length that is >95% of the Complete Cds gene lengths), so that a failure to find a 19-mer fragment match within a given target sequence would not be due to sequence truncation. Sequences were further screened to eliminate laboratory strains (with the exception of PR8 and WNV since these strains were used in testing), because the lab strains are likely to have a higher number of artificially-induced mutations; this resulted in the removal of 2-11 sequences from each viral segment. Finally the sequences were crosschecked against the GenBank Nucleotide Sequence Database (http://www.ncbi.nlm.nih.gov/entrez/query.fcgi?db=Nucleotide) to ensure that all sequences were still current. Table 1 lists the GenBank accession numbers of the human influenza sequences that met the preceding criteria and were used in the subsequent analyses.

TABLE 1-1
GenBank accession numbers for PB2 sequences (segment 1) used in this
analysis.

CY007474, CY002815, CY003391, CY003711, CY002687, CY006202, CY002695, CY002711, CY003383,
CY006674, CY008531, CY002991, CY006434, CY002543, CY003303, CY009003, CY003695, CY006922,
CY002631, CY002535, CY003311, CY006682, CY002575, CY003407, CY003007, CY003399, CY003479,
CY003487, CY006178, CY006370, CY002807, CY006362, CY002703, CY003015, CY003471, CY003031,
CY003295, CY003319, CY003335, CY003840, CY009243, CY001959, CY002679, CY002399, CY006426,
CY006882, CY003023, CY008155, CY002407, CY002623, CY003327, CY006786, CY009179, CY009187,
CY009195, CY009203, CY009211, CY009227, CY009235, CY002655, CY002647, AF258525, AF258524,
DQ249263, AF398866, CY009323, AJ564805, X15283, M38277, CY009291, CY009299, CY008995, CY009371,
CY009347, CY009339, X99035, AF389115, NC_002023, J02179, DQ208309, CY002359, CY002639, CY003679,
CY002159, CY003703, CY003768, CY006194, CY006418, CY002671, CY006402, CY006410, CY006874,
CY002999, CY006394, CY002367, CY002663, CY006114, CY006754, CY003776, CY003375, CY001687,
AB126635, AB126626, M73524, AY209951, AY209947, AY209948, AY209949, AY209950, AY209945, AY209946,
M91713, AY209942, AY209943, AY209944, AY209941, AY209940, AY209939, M23970, AY209938, AY209937,
AY209936, M81587, M73521, M81575, M81581, AY209934, AY209935, CY002015, CY002079, CY002191,
CY002207, CY002455, CY003647, CY002007, CY002063, CY002463, CY002471, CY006083, CY006091,
CY002495, CY003655, CY006298, CY002271, CY002023, CY002487, CY002727, CY003055, CY002247,
CY002783, CY007802, CY007810, CY007818, CY008347, CY008355, CY008363, CY008371, CY008379,
CY008387, CY008395, CY008403, CY008411, CY008419, CY008427, CY008435, CY008443, CY008451,
CY008563, CY008571, CY008579, CY008587, CY008595, CY008603, CY008611, CY008619, CY008635,
CY008643, CY008651, CY008659, CY009035, CY009043, CY009051, CY006130, CY008627, CY006162,
CY002039, CY002743, CY003063, CY003351, CY006138, CY006154, CY006146, CY002071, CY002199,
CY002921, CY002929, CY002976, CY002983, CY002055, CY002215, CY002231, CY002239, CY002423,
CY002599, CY003039, CY003343, CY006186, CY006378, CY006386, CY000040, CY002255, CY002937,
CY003663, CY002223, CY002961, CY002031, CY000768, CY002945, CY003671, CY006122, CY002953,
CY002969, CY000264, CY002183, CY002263, CY002295, CY008171, CY001036, CY002719, CY002913,
CY003079, CY006099, CY002431, CY002439, CY002447, CY002047, CY008211, CY002799, CY003415,
CY006442, CY007282, CY007290, CY007298, CY007306, CY007314, CY007322, CY007330, CY007346,
CY007354, CY007378, CY007386, CY007394, CY007410, CY007434, CY007442, CY007450, CY007458,
CY007482, CY007490, CY007498, CY007514, CY007538, CY007546, CY007554, CY007562, CY008227,
CY008235, CY008915, CY009259, CY009267, CY009275, CY007650, CY008195, CY000896, CY007338,
CY007506, CY008243, CY007370, CY007586, CY000376, CY002287, CY007362, CY007402, CY007426,
CY007466, CY007522, CY007530, CY007570, CY007578, CY008259, CY007418, CY001236, CY002791,
CY008251, CY002415, CY002607, CY002615, CY002735, CY002767, CY003047, CY003423, CY008219,
CY008523, CY000568, CY002087, CY002479, CY002511, CY002591, CY002775, CY002351, CY000016,
CY000032, CY000128, CY000136, CY000152, CY000160, CY000176, CY000184, CY000352, CY000384,
CY000519, CY001044, CY001052, CY000956, CY000760, CY001519, CY001719, CY000368, CY000972,
CY000048, CY000064, CY000080, CY000088, CY000104, CY000144, CY000168, CY000255, CY000272,
CY000360, CY000480, CY000512, CY000528, CY000776, CY000784, CY000792, CY000888, CY000916,
CY001095, CY001260, CY001412, CY001543, CY001567, CY001631, CY001639, CY001647, CY001655,
CY002111, CY000096, CY003687, CY000056, CY001028, CY001071, CY001103, CY001060, CY006866,
CY001292, CY006946, CY006930, CY006938, CY006954, CY006962, CY006970, CY006978, CY006986,
CY006994, CY007002, CY007010, CY007018, CY007026, CY007034, CY007050, CY007066, CY007082,
CY007090, CY007098, CY007106, CY007114, CY007122, CY007130, CY007138, CY007146, CY007154,
CY007162, CY007178, CY007186, CY007194, CY007202, CY007218, CY007226, CY007234, CY007250,
CY007266, CY007274, CY008875, CY008883, CY008891, CY008899, CY008907, CY008923, CY009027,
CY009251, CY007258, CY001196, CY008203, CY001380, CY000872, CY000072, CY001119, CY007042,
CY007058, CY007074, CY007210, CY007242, CY007170, CY008547, CY008555, CY000024, CY000200,
CY000908, CY000980, CY001020, CY001212, CY001476, CY001551, CY000880, CY001428, CY000008,
CY000112, CY000964, CY001167, CY001220, CY001228, CY001300, CY001348, CY001468, CY001559,
CY002527, CY000924, CY003135, CY003199, CY003119, CY003151, CY003159, CY003431, CY003784,
CY000232, CY000288, CY000496, CY003103, CY003111, CY003132, CY003143, CY003175, CY003183,
CY003191, CY003207, CY000948, CY000296, CY001735, CY001087, CY001324, CY000120, CY000216,
CY000224, CY000240, CY000248, CY000304, CY000320, CY000336, CY000344, CY000432, CY000440,
CY000448, CY000536, CY000552, CY000560, CY000592, CY000800, CY000940, CY001079, CY001159,
CY001191, CY001244, CY001743, CY001951, CY002135, CY003167, CY003215, CY000424, CY000504,
CY001332, CY001308, CY008323, CY007594, CY007602, CY007610, CY007658, CY007666, CY007674,
CY007682, CY007690, CY007698, CY007706, CY007714, CY007722, CY007730, CY007738, CY007746,
CY007754, CY007762, CY007770, CY007778, CY007786, CY007794, CY008291, CY008331, CY008275,
CY008299, CY001444, CY008267, CY001316, CY008283, CY008307, CY008339, CY008315, CY001268,
CY000400, CY000408, CY000416, CY000544, CY000632, CY001111, CY001340, CY001436, CY001135,
CY001204, CY001151, CY000932, CY002823, CY000192, CY000583, CY001175, CY003095, CY003087,
CY000208, CY000280, CY000392, CY000488, CY000576, CY002335, CY001727, CY000312, CY000328,
CY000455, CY003455, CY003463, CY003247, CY003287, CY000616, CY000704, CY000720, CY001004,
CY003832, CY000816, CY003271, CY003279, CY003255, CY003263, CY003816, CY000472, CY000664,
CY000672, CY000712, CY000744, CY000824, CY000840, CY000848, CY000856, CY000988, CY001252,
CY001284, CY001404, CY001527, CY001372, CY003824, CY006666, CY008483, CY008491, CY008507,
CY008763, CY008771, CY008779, CY008787, CY008795, CY008803, CY008811, CY008827, CY008851,
CY008859, CY008867, CY009091, CY009107, CY009123, CY009131, CY009155, CY009163, CY009171,
CY008515, CY008499, CY008755, CY008819, CY008835, CY008843, CY009083, CY009139, CY009147,
CY000696, CY001143, AJ293920, CY001695, CY001879, CY001903, CY001983, CY001999, CY002311,
CY003615, CY003631, CY006067, CY001775, CY001831, CY001847, CY001895, CY001919, CY001991,
CY002303, CY002375, CY003623, CY003639, CY000624, CY000648, CY000736, CY000808, CY001943,
CY003583, CY003591, CY003599, CY001935, CY003231, CY003808, CY003792, CY006906, CY000608,
CY000464, CY000600, CY000680, CY000688, CY000728, CY000832, CY000996, CY001012, CY001127,
CY001583, CY001663, CY001671, CY001751, CY001759, CY001767, CY001783, CY001815, CY001839,
CY001863, CY001871, CY001887, CY001975, CY002119, CY002143, CY002175, CY002319, CY002343,
CY002583, CY001927, CY003239, CY003439, CY003575, CY003607, CY001799, CY002167, CY003223,
CY007642, CY009115, CY006075, CY003800, CY002567, CY001276, CY001703, CY000640, CY000656,
CY000752, CY000864, CY001183, CY001356, CY001420, CY001535, CY001855, CY001911, CY001967,
CY002151, CY001615, CY001711, CY001388, CY001452, CY001460, CY001599, CY001607, CY001623,
CY002519, CY002559, CY001364, CY003447, CY006170, CY003567, CY002391, CY002383, CY001484,
CY001492, CY001500, CY001679, CY001807, CY001823, CY006258, CY006546, CY006290, CY006466,
CY006482, CY006490, CY006498, CY006506, CY006538, CY006554, CY006562, CY006570, CY006578,
CY006586, CY006594, CY006602, CY006610, CY006626, CY006642, CY006778, CY006794, CY006802,
CY006810, CY008187, CY008539, CY008931, CY008947, CY008955, CY008963, CY008971, CY008979,
CY008987, CY006522, CY001791, CY002127, CY001575, CY001511, CY001591, CY002551, AF258841,
AF258842, CY006250, CY006274, CY006266, CY006234, CY006242, CY006282, CY006450, CY006458,
CY006514, CY006530, CY006618, CY006634, CY008939, CY006474, AF037417, AF483602, AF037414,
AF037415, AF037416, CY002279, AF037413, U71133, U71134, U71135, CY006346, CY003759, CY006338,
U71132, CY006354, CY009019, AF037412, CY003719, CY003071, CY008747, M73517, CY003519, CY008731,
CY008739, CY003359, U62543, CY003551, CY002095, CY002759, CY008723, CY003543, CY003527, CY003511,
CY008459, CY008675, CY008715, CY009075, CY006330, CY008179, CY003751, CY003727, CY003743,
CY006322, CY006858, CY009059, CY006059, CY006762, CY007634, CY003495, CY006106, CY007626,
CY008475, CY008667, CY006210, CY006898, CY006698, CY006706, CY006714, CY007618, CY006738,
CY006746, CY006770, CY006850, CY006730, CY006842, CY006890, CY008699, CY008707, CY009067,
CY006051, CY003735, CY006914, CY003503, CY006722, CY006826, CY006834, CY003535, CY006818,
CY009011, CY002103, CY003559, M91712, CY002751, CY006314, CY008467, CY008691, CY008683, AY210149,
AY210150, CY002503, CY006226, CY006690, AY210146, AY210147, AY210148, AY210143, AY210144,
AY210145, AJ564804, CY006306, AY210140, AY210141, AY210142, J02140, CY008163, AF348170, AF348171,
CY006218, AY210137, AY210138, AY210139, DQ360837, DQ372598, DQ138181, AY651721, AY651718,
AY651719, AY818126, AB212050, AB212051, AY576380, AY576381, AF258846, AF036363, AF258837,
AF258838, AF258839, AF258840, AF258843, AF258844, AF258845, AJ404632, AF084261, AF084262, AF084263,
AF115290, AF115291, AF046093, DQ226172, AF258835, AF258836, AJ404630, AJ404631, AY043030

TABLE 1-2
GenBank accession numbers for PB1 sequences (segment 2) used in this
analysis.

CY007473, CY002542, CY003382, CY002710, CY003390, CY002694, CY002814, CY002686, CY002990,
CY003710, CY008530, CY003694, CY006201, CY006433, CY006921, CY009002, CY003302, CY002630,
CY006673, CY002534, CY003310, CY006681, CY002574, CY006369, CY003478, CY003406, CY003486,
CY002622, CY002702, CY001958, CY003470, CY003030, CY003398, CY002806, CY008154, CY003014,
CY006177, CY006881, CY009242, CY003006, CY003334, CY006361, CY002678, CY003022, CY002398,
CY003839, CY003326, CY006785, CY003318, CY006425, CY002406, CY003294, CY002646, CY002654,
CY009178, CY009186, CY009194, CY009202, CY009210, CY009234, CY009226, AF258526, AF342823,
AF258527, AF398865, CY009322, M25934, AJ564807, M38376, CY009290, CY009298, CY008994, M25932,
CY009370, CY009346, CY009338, X99037, AF389116, NC_002021, J02178, DQ208310, CY002158, CY002638,
CY006193, CY002662, CY002358, CY006393, CY006409, CY006417, CY003702, CY003678, CY006401,
CY006873, CY006753, CY003767, CY002366, CY006113, CY002998, CY002670, CY001686, CY003775,
CY003374, AB126625, AB126634, M25935, AY210025, AY210021, AY210022, AY210023, AY210024, AY210019,
AY210020, AY210016, AY210017, AY210018, AY210015, AY210014, AY210013, M23972, AY210012, AY210011,
AY210010, M25924, M81574, M81580, M81586, AY210008, AY210009, CY002006, CY002014, CY003646,
CY006082, CY006297, CY006090, CY002038, CY002270, CY002462, CY002470, CY003654, CY007801,
CY007809, CY007817, CY008346, CY008354, CY008370, CY008378, CY008386, CY008394, CY008402,
CY008410, CY008418, CY008426, CY008434, CY008442, CY008450, CY008562, CY008570, CY008578,
CY008586, CY008602, CY008610, CY008626, CY008650, CY008658, CY009034, CY009042, CY009050,
CY006137, CY008362, CY008594, CY008618, CY008634, CY008642, CY002190, CY002454, CY006129,
CY006153, CY002726, CY006145, CY002022, CY002062, CY002078, CY002486, CY002494, CY002742,
CY002782, CY003062, CY003350, CY006161, CY002206, CY002246, CY003054, CY000039, CY000263,
CY002070, CY002198, CY002238, CY002928, CY002982, CY002214, CY002598, CY002054, CY001035,
CY006377, CY003662, CY006098, CY006385, CY002912, CY002920, CY002952, CY002968, CY002975,
CY002936, CY000767, CY000375, CY002960, CY002718, CY002944, CY003670, CY007465, CY006441,
CY007281, CY007289, CY007297, CY007305, CY007313, CY007321, CY007329, CY007337, CY007345,
CY007353, CY007361, CY007369, CY007377, CY007385, CY007393, CY007401, CY007409, CY007417,
CY007433, CY007441, CY007457, CY007481, CY007489, CY007497, CY007529, CY007537, CY007545,
CY007553, CY007561, CY007649, CY008210, CY008218, CY008226, CY008234, CY008914, CY009258,
CY009266, CY009274, CY001235, CY007425, CY007449, CY007513, CY007569, CY007577, CY007585,
CY008194, CY008242, CY008258, CY002222, CY002230, CY007505, CY007521, CY008250, CY006185,
CY003078, CY006121, CY008170, CY000567, CY000895, CY002182, CY002262, CY002286, CY002294,
CY002422, CY002446, CY002774, CY003038, CY003046, CY003414, CY002086, CY002734, CY002798,
CY008522, CY002254, CY002430, CY002030, CY002046, CY002414, CY002438, CY002478, CY002510,
CY002590, CY002606, CY002614, CY002766, CY003342, CY003422, CY002790, CY000256, CY000007,
CY000015, CY000063, CY000087, CY000103, CY000135, CY000159, CY000167, CY000175, CY000183,
CY000271, CY000367, CY000383, CY000479, CY000511, CY000907, CY001043, CY001051, CY001102,
CY000915, CY000023, CY000031, CY000111, CY000143, CY000151, CY000199, CY000527, CY000759,
CY000783, CY000971, CY001059, CY001070, CY001227, CY001299, CY001411, CY001638, CY001654,
CY002350, CY000359, CY003686, CY000071, CY000047, CY000351, CY000518, CY000791, CY000871,
CY000879, CY001019, CY001118, CY001518, CY001566, CY000095, CY000079, CY007057, CY001027,
CY006865, CY006929, CY006937, CY006945, CY006953, CY006961, CY006969, CY006977, CY006985,
CY006993, CY007001, CY007009, CY007017, CY007025, CY007033, CY007041, CY007049, CY007065,
CY007073, CY007081, CY007089, CY007097, CY007105, CY007113, CY007121, CY007129, CY007137,
CY007145, CY007153, CY007177, CY007185, CY007193, CY007201, CY007209, CY007217, CY007225,
CY007233, CY007241, CY007249, CY007257, CY007265, CY007273, CY008554, CY008874, CY008882,
CY008890, CY008898, CY008906, CY008922, CY009026, CY009250, CY007161, CY007169, CY008202,
CY000887, CY000979, CY001094, CY001291, CY001211, CY001475, CY008546, CY000775, CY000055,
CY000127, CY000923, CY000955, CY000963, CY001166, CY001219, CY001259, CY001347, CY001379,
CY001427, CY001467, CY001550, CY001630, CY001646, CY001718, CY002526, CY001195, CY001558,
CY001542, CY002110, CY000215, CY000223, CY000239, CY000247, CY000439, CY000495, CY000503,
CY000535, CY000947, CY000119, CY000231, CY000343, CY000447, CY000799, CY001086, CY001323,
CY001742, CY003128, CY003134, CY003142, CY003150, CY003158, CY003198, CY003430, CY003110,
CY003102, CY003182, CY003206, CY003783, CY000287, CY003174, CY000295, CY000319, CY000423,
CY000431, CY000543, CY000551, CY000559, CY000591, CY000631, CY001110, CY001150, CY001158,
CY001243, CY001307, CY001339, CY002134, CY000303, CY003166, CY003190, CY003214, CY007721,
CY007593, CY007601, CY007609, CY007673, CY007681, CY007689, CY007697, CY007705, CY007713,
CY007729, CY007737, CY007753, CY007761, CY007769, CY007777, CY007785, CY007793, CY008274,
CY008290, CY008322, CY008330, CY001315, CY008282, CY007657, CY007665, CY007745, CY008266,
CY008306, CY008314, CY008338, CY008298, CY000939, CY003118, CY001435, CY000335, CY000399,
CY000407, CY000415, CY000931, CY001078, CY001134, CY001190, CY001203, CY001267, CY001331,
CY001734, CY001950, CY001443, CY000207, CY000487, CY000582, CY001174, CY002822, CY000327,
CY003094, CY000191, CY000279, CY000391, CY000575, CY001726, CY003086, CY000311, CY002334,
CY000456, CY000471, CY000615, CY000671, CY000719, CY000987, CY001251, CY003246, CY003254,
CY003270, CY003454, CY003462, CY003262, CY003286, CY000663, CY000695, CY000703, CY000711,
CY000743, CY000847, CY001003, CY001283, CY001403, CY000839, CY003815, CY003831, CY006665,
CY008482, CY008490, CY008498, CY008506, CY008514, CY008762, CY008770, CY008778, CY008786,
CY008794, CY008802, CY008810, CY008826, CY008834, CY008850, CY008858, CY008866, CY009106,
CY009122, CY009130, CY009138, CY009146, CY009154, CY009162, CY000855, CY008754, CY008842,
CY009082, CY009090, CY009170, CY008818, CY003278, CY003823, CY000815, CY000823, CY001142,
CY001371, CY001526, CY000463, CY000599, CY000727, CY002142, CY000647, CY000679, CY000687,
CY001582, CY001662, CY001670, CY001694, CY001750, CY001758, CY001766, CY001774, CY001782,
CY001798, CY001830, CY001846, CY001862, CY001870, CY001878, CY001886, CY001894, CY001902,
CY001918, CY001926, CY001934, CY001974, CY001990, CY001998, CY002166, CY002302, CY003598,
CY003622, CY003230, CY003614, CY006905, CY002582, CY000607, CY000639, CY000655, CY000735,
CY000807, CY000831, CY001126, CY001982, CY002118, CY002318, CY002342, CY003630, CY001942,
CY001011, CY001182, CY001838, CY002310, CY003446, CY003574, CY003606, CY003799, CY003807,
CY006066, CY006074, CY003582, CY003590, CY003791, CY007641, CY009114, CY003222, CY003638,
CY002374, CY001451, CY001459, CY003238, CY003438, CY000623, CY000751, CY000863, CY000995,
CY001275, CY001355, CY001363, CY001387, CY001419, CY001534, CY001598, CY001614, CY001710,
CY001814, CY001854, CY002150, CY002174, CY002518, CY002558, CY002566, CY006169, CY001606,
CY001622, CY001966, CY001702, CY001910, AJ293921, CY001491, CY001499, CY001678, CY001806,
CY001822, CY002382, CY002390, CY003566, CY001590, CY006465, CY006257, CY006289, CY006481,
CY006489, CY006497, CY006505, CY006521, CY006545, CY006553, CY006561, CY006569, CY006577,
CY006585, CY006593, CY006601, CY006609, CY006625, CY006641, CY006777, CY006793, CY006801,
CY006809, CY008186, CY008930, CY008946, CY008954, CY008962, CY008970, CY008978, CY008538,
CY006537, CY008986, CY002550, CY001483, CY001574, CY001790, CY002126, CY001510, AF258822,
AF258823, CY006233, CY006241, CY006249, CY006265, CY006273, CY006281, CY006449, CY006457,
CY006473, CY006513, CY006529, CY006617, CY006633, CY008938, AF037423, AF483601, AF037420,
AF037421, AF037422, CY002278, AF037419, U71129, U71130, U71131, CY006337, CY006345, CY003758,
U71128, CY006353, CY009018, AF037418, CY003718, CY003070, CY008746, M25936, CY003518, CY008730,
CY008738, CY003358, CY003550, CY002094, CY008722, CY002758, CY003510, CY003526, CY003542,
CY008458, CY008674, CY008714, CY009074, CY006329, CY008178, CY003750, CY006857, CY003726,
CY006321, CY003742, CY009058, CY006058, CY006761, CY007633, CY003494, CY006105, CY006209,
CY007625, CY008474, CY008666, CY006897, CY006697, CY006705, CY006713, CY007617, CY006769,
CY006737, CY006745, CY006849, CY006729, CY006841, CY006889, CY008698, CY008706, CY009066,
CY003734, CY006050, CY006913, CY003502, CY006721, CY006825, CY006833, CY009010, CY003534,
CY006817, CY003558, CY002102, CY002750, CY006313, CY008466, CY008690, CY008682, AY210283,
AY210284, CY006225, CY006689, CY002502, AY210279, AY210280, AY210281, AY210277, AY210278,
AY210282, AJ564806, CY006305, AY210274, AY210275, AY210276, AF348172, AF348173, J02138, CY008162,
CY006217, AY210271, AY210272, AY210273, DQ360838, DQ372597, DQ138163, DQ138164, DQ138165,
AY818129, DQ138159, DQ138160, AY651664, AY651667, AY651665, AY651666, AB212052, AY576392,
AY576393, AF258827, AF036362, AF258818, AF258819, AF258820, AF258821, AF258824, AF258825, AF258826,
AJ404633, AF046094, AF084264, AF084265, AF084266, AF115293, DQ226161, AF258816, AF258817, AJ404634,
AY043029, M74899

TABLE 1-3
GenBank accession numbers for PA sequences (segment 3) used in this
analysis.

DQ381564, CY007472, CY002541, CY002813, CY003381, CY002629, CY002685, CY002693, CY002709,
CY002989, CY003301, CY003693, CY003709, CY006200, CY006672, CY008529, CY009001, CY006920,
CY006432, CY003389, CY003309, CY002533, CY006680, CY001957, CY002677, CY003477, CY006880,
CY003405, CY003317, CY002573, CY002621, CY002701, CY002805, CY003021, CY003293, CY003325,
CY003333, CY003397, CY003469, CY003485, CY003838, CY006176, CY006368, CY006424, CY006360,
CY003029, CY002397, CY003005, CY003013, CY009241, CY008153, CY006784, CY002405, CY002645,
CY002653, CY009177, CY009185, CY009193, CY009201, CY009209, CY009225, CY009233, AF258519,
AF258518, AF398864, AF398862, CY009321, AJ605762, CY009289, CY009297, CY008993, CY009369, CY009345,
CY009337, X99039, AF389117, NC_002022, X17336, DQ208311, CY002157, CY002357, CY002637, CY002365,
CY003677, CY006408, CY006752, CY006416, CY006192, CY006392, CY006872, CY003701, CY006400,
CY003766, CY006112, CY002661, CY002997, CY002669, CY001685, CY003774, CY003373, AB126627,
AB126633, M26079, AY210007, AY210003, AY210004, AY210005, AY210006, AY210001, AY210002, AY209998,
AY209999, AY210000, AY209997, AY209996, AY209995, M23974, AY209994, AY209993, AY209992, M26078,
M81573, M81579, M81585, AY209990, AY209991, CY002061, CY002269, CY002469, CY003645, CY002005,
CY002037, CY002461, CY002205, CY003653, CY006081, CY006089, CY006296, CY002725, CY002013,
CY002189, CY002077, CY002741, CY008657, CY002485, CY008649, CY007800, CY008345, CY008353,
CY008361, CY008369, CY008377, CY008385, CY008393, CY008401, CY008417, CY008425, CY008433,
CY008441, CY008449, CY008577, CY008585, CY008633, CY008641, CY009033, CY009041, CY009049,
CY008569, CY008609, CY007808, CY007816, CY008561, CY008593, CY008601, CY008617, CY008625,
CY002453, CY008409, CY006160, CY002493, CY003061, CY002021, CY002245, CY006128, CY003349,
CY006136, CY002781, CY003053, CY006144, CY006152, CY002181, CY002069, CY002197, CY002213,
CY002229, CY002237, CY002261, CY002597, CY002911, CY002919, CY002981, CY002053, CY002429,
CY002974, CY000038, CY000374, CY000766, CY001234, CY002045, CY002253, CY002413, CY002445,
CY002927, CY002951, CY002967, CY003661, CY006184, CY006376, CY006384, CY000262, CY002935,
CY000894, CY002943, CY001034, CY002421, CY002613, CY002959, CY003341, CY003669, CY008913,
CY003037, CY006440, CY007280, CY007296, CY007304, CY007312, CY007320, CY007328, CY007336,
CY007344, CY007352, CY007368, CY007376, CY007384, CY007392, CY007408, CY007432, CY007456,
CY007480, CY007512, CY007544, CY007648, CY008193, CY008225, CY009257, CY009265, CY009273,
CY007416, CY007584, CY008169, CY007424, CY007496, CY008249, CY007360, CY007520, CY002437,
CY002765, CY002029, CY002717, CY007464, CY007488, CY007536, CY007560, CY008241, CY002733,
CY007288, CY007440, CY007448, CY007528, CY007552, CY007568, CY007576, CY008209, CY008217,
CY008233, CY008257, CY006097, CY007400, CY003077, CY007504, CY000566, CY002789, CY002085,
CY002221, CY002285, CY002477, CY002589, CY002605, CY003413, CY003421, CY002293, CY008521,
CY002509, CY002773, CY002797, CY003045, CY006120, CY000030, CY000006, CY000022, CY000350,
CY001093, CY001549, CY001629, CY001645, CY001653, CY002349, CY000078, CY000758, CY001165,
CY000014, CY000046, CY000062, CY000070, CY000086, CY000094, CY000102, CY000126, CY000134,
CY000150, CY000158, CY000166, CY000174, CY000182, CY000198, CY000254, CY000270, CY000358,
CY000366, CY000382, CY000478, CY000510, CY000517, CY000526, CY000782, CY000790, CY000870,
CY000878, CY000906, CY000914, CY000954, CY000970, CY001018, CY001042, CY001050, CY001058,
CY001069, CY001117, CY001218, CY001226, CY001258, CY001290, CY001298, CY001346, CY001378,
CY001410, CY001517, CY001541, CY000110, CY001026, CY000142, CY001565, CY001637, CY000886,
CY001557, CY001717, CY003685, CY001466, CY006952, CY006864, CY006944, CY007200, CY006928,
CY006936, CY006960, CY006968, CY006976, CY006984, CY006992, CY007000, CY007008, CY007016,
CY007024, CY007032, CY007040, CY007048, CY007056, CY007064, CY007072, CY007080, CY007088,
CY007096, CY007104, CY007112, CY007120, CY007128, CY007136, CY007144, CY007152, CY007168,
CY007184, CY007192, CY007216, CY007224, CY007240, CY007264, CY007272, CY008201, CY008553,
CY008873, CY008881, CY008889, CY008897, CY008905, CY008921, CY009025, CY009249, CY007232,
CY007256, CY002525, CY007208, CY007248, CY007160, CY007176, CY000978, CY001210, CY001474,
CY008545, CY002109, CY000054, CY000774, CY000922, CY001101, CY000962, CY001194, CY001426,
CY000238, CY000246, CY000550, CY000798, CY000946, CY001338, CY001733, CY003133, CY003149,
CY003429, CY003782, CY003157, CY003173, CY003197, CY003205, CY000118, CY000214, CY000222,
CY000230, CY000294, CY000302, CY000334, CY000342, CY000422, CY000430, CY000438, CY000446,
CY000494, CY000502, CY000534, CY000558, CY000590, CY000630, CY000938, CY001077, CY001157,
CY001242, CY001306, CY001322, CY001434, CY001741, CY001949, CY002133, CY003101, CY003109,
CY003126, CY003141, CY003189, CY001314, CY003181, CY001133, CY001109, CY001189, CY000318,
CY000542, CY000930, CY001149, CY007592, CY007600, CY007608, CY007656, CY007664, CY007672,
CY007680, CY007688, CY007696, CY007704, CY007744, CY007760, CY007768, CY007776, CY007784,
CY007792, CY008273, CY008289, CY008321, CY007752, CY008329, CY007728, CY008305, CY000414,
CY007720, CY007712, CY007736, CY008337, CY008265, CY008281, CY001266, CY001330, CY008297,
CY008313, CY000286, CY000398, CY001085, CY000406, CY003213, CY003165, CY001202, CY001442,
CY003117, CY001725, CY000190, CY000278, CY000390, CY000486, CY000574, CY000581, CY002821,
CY003093, CY000326, CY001173, CY003085, CY002333, CY000310, CY000206, CY003261, CY003453,
CY003245, CY000454, CY000470, CY000614, CY000670, CY000694, CY000702, CY000710, CY000718,
CY000742, CY000814, CY000822, CY000846, CY000854, CY000986, CY001002, CY001250, CY001282,
CY001370, CY003285, CY000662, CY003253, CY003269, CY003461, CY000838, CY001525, CY001402,
CY003830, CY008481, CY008801, CY009105, CY009137, CY006664, CY008489, CY008505, CY008513,
CY008785, CY008793, CY008809, CY008849, CY008865, CY009129, CY009145, CY009153, CY009169,
CY008497, CY008769, CY003814, CY008761, CY008753, CY008857, CY009121, CY009161, CY008777,
CY008817, CY008825, CY008833, CY008841, CY009081, CY009089, CY003277, CY003822, CY001141,
CY001773, CY001829, CY001845, CY001861, CY001869, CY001877, CY001885, CY001917, CY001933,
CY001973, CY002117, CY002173, CY003237, CY003613, CY003621, CY001581, CY001925, CY001981,
CY001989, CY001997, CY002141, CY003573, CY003605, CY000462, CY000598, CY000606, CY000622,
CY000646, CY000654, CY000678, CY000686, CY000726, CY000734, CY000806, CY000830, CY000994,
CY001125, CY001181, CY001354, CY001362, CY001458, CY001693, CY001701, CY001709, CY001749,
CY001757, CY001765, CY001781, CY001797, CY001813, CY001837, CY001901, CY001909, CY001941,
CY002165, CY002301, CY002565, CY002581, CY003229, CY003581, CY003589, CY003597, CY003637,
CY006065, CY006073, CY006904, CY000638, CY001893, CY003790, CY002341, CY003629, CY001661,
AJ293922, CY002309, CY001010, CY001274, CY001669, CY007640, CY009113, CY003437, CY002517,
CY003445, CY001853, CY000862, CY000750, CY001533, CY002557, CY002373, CY001597, CY002149,
CY002317, CY001386, CY001418, CY001605, CY001613, CY001621, CY001965, CY003806, CY001450,
CY003798, CY003221, CY006168, CY001805, CY001821, CY002389, CY001498, CY003565, CY001490,
CY001789, CY002381, CY001509, CY001677, CY006288, CY006464, CY008185, CY006256, CY006552,
CY006576, CY006584, CY008945, CY008961, CY006480, CY006488, CY006496, CY006504, CY006520,
CY006536, CY006544, CY006568, CY006592, CY006624, CY006640, CY006776, CY006792, CY006808,
CY008929, CY008953, CY008969, CY008977, CY008985, CY006600, CY006608, CY008537, CY006800,
CY001482, CY006560, CY002125, CY001573, CY001589, CY002549, AF257197, AF257198, CY006264,
CY006472, CY006280, CY006232, CY006248, CY006272, CY006456, CY006528, CY006632, CY008937,
CY006240, CY006448, CY006616, CY006512, AF037429, AF483603, AF037426, AF037427, AF037428, CY002277,
AF037425, U71137, U71138, U71139, CY006344, CY003757, CY006336, U71136, CY006352, CY009017,
AF037424, CY003717, CY008745, CY003069, CY003357, CY003517, CY008729, CY008737, CY003549,
CY002093, CY008721, CY002757, CY003509, CY003525, CY003541, CY009073, CY008673, CY008713,
CY008457, CY006328, CY008177, CY003749, CY003741, CY006856, CY009057, CY003725, CY006320,
CY006057, CY006760, CY007632, CY006104, CY003493, CY006208, CY007624, CY008473, CY008665,
CY006896, CY006696, CY006704, CY006712, CY007616, CY006736, CY006744, CY006768, CY006848,
CY006840, CY008697, CY008705, CY006728, CY006888, CY009065, CY006049, CY003733, CY006912,
CY003501, CY006720, CY006824, CY006832, CY009009, CY003533, CY006816, CY002101, CY002749,
CY003557, CY008681, CY006312, CY008465, CY008689, AY210205, AY210206, CY002501, CY006688,
CY006224, AY210202, AY210203, AY210204, AY210199, AY210200, AY210201, AJ605763, CY006304,
AY210196, AY210197, AY210198, AF348175, J02139, CY008161, AF348174, CY006216, AY210193, AY210194,
AY210195, DQ360839, DQ138184, DQ138185, DQ138186, DQ138187, DQ138188, DQ372596, DQ099791,
DQ099792, AY818132, AY651610, AY651611, AY651613, AY651612, AB212053, AY576404, AY576405,
AF257202, AF257193, AF257194, AF257195, AF257196, AF257199, AF257200, AF257201, AJ289874, AJ291402,
AF046095, AF084267, AF084268, AF084269, AF084270, AF115294, AF115295, AF257191, AF257192, AJ404637,
AY043028

TABLE 1-4
GenBank accession numbers for HA sequences (segment 4) used in this
analysis.

L20113, U38242, DQ265706, CY007467, CY002624, CY002808, CY002688, CY003384, CY002984, CY002680,
CY003376, CY003704, CY006195, CY006667, CY006915, CY002536, CY003688, CY002704, CY003296,
CY008996, CY006427, CY008524, DQ249260, CY003304, CY002528, CY006675, AY299507, AY297155,
AY297156, AY299497, AY299509, AY299505, AY299495, AY299496, AY299500, AY299502, AY299504,
AY299508, AY299499, AY299498, AY299506, AY297157, AY299501, AY299503, AY297154, AY299494,
AJ457877, AJ517815, AJ457930, AY971011, CY003472, CY006363, CY003833, CY002568, CY002672, CY002392,
CY003024, CY001952, CY002616, CY002800, CY003016, CY003288, CY003312, CY003400, CY003464,
CY003480, CY006171, CY006355, CY003320, CY009236, CY008148, CY006419, CY002696, CY006779,
CY006875, CY002400, CY003008, CY003328, CY003392, CY003000, AY682833, AJ517814, AJ457871, AJ457873,
AJ457872, AJ457886, AJ457865, AJ457870, AJ457888, AY971009, AJ457867, AJ457866, AJ457863, AJ457869,
AJ457881, AY971006, AJ457868, AY971008, AY063229, AY971010, AY063228, CY002640, CY009172,
CY009180, CY009188, CY009196, CY009204, CY009220, CY009228, CY002648, AJ457902, AJ457887, AJ457904,
AJ457862, AY971007, AB043499, AB043498, AY029287, AY029288, AY029289, AY029290, AY029291,
AY029292, AY971004, AY971003, AY289929, AJ344014, AF534030, AF534031, AF534038, AJ457905, AB043496,
AB043497, AF268312, AF268313, AF386775, AF386776, AF386777, AF386778, AF386780, AF386781, AF386782,
AF386779, AF387491, AF342821, AJ457885, AJ457892, AJ457894, AJ457898, AB043495, AB043500, AF534025,
AF534026, AF534027, AJ457891, AJ457895, AJ457897, AB043494, AY282756, AY282758, AF026153, AF026154,
AF026155, AF026156, AF026157, AF026158, AF026159, AF026160, AJ457906, AJ457896, AB043492, AB043493,
AF131993, AF131994, AF131995, AF386773, AF386774, AY289928, AY289930, AF398878, AJ344022, AF398875,
AJ457907, AJ457899, AJ457900, AB043491, ISDNX127, U53162, U53163, AJ457901, AB043490, AF055426,
AY289927, CY009316, L24362, Z54289, Z54288, AJ457908, AB043489, L19017, L19549, L33480, L33481, L33482,
L33743, L33744, L33745, L33746, L33747, L33748, L33749, L33750, L33751, L33758, L33780, L19013, L19018,
L19020, L19022, L19026, L19027, L20106, L20107, L20108, L20109, L20110, L20111, L20112, L20116, L20117,
D13573, D13574, AB043488, D31949, L19016, L19028, L33756, Z54287, X59778, L19011, L19014, L19015,
L19019, L19021, L19023, L19024, L19025, L33487, L33752, L33753, L33754, L33755, M33748, AB043487,
L33485, L33486, D00841, X17224, D00406, D00407, L19012, L33483, Z54286, S62154, L33490, L33491, L33492,
L33493, AJ289702, X17221, M59324, M59325, M59326, M59327, M59328, L33489, X00031, X00030, M38353,
X86654, X86655, X86656, X86657, X00028, L33484, L33488, L33757, CY009284, CY009292, X00027, K01331,
CY008988, AB043486, CY009364, AB043485, AB043484, CY009340, AB043483, AB043482, AB043480,
AB043481, CY009332, AB043479, U02085, AF494249, AF494250, AF494247, AF494248, AF494251, AF494246,
NC_002017, AF389118, J02144, J02176, U08903, U08904, AF117241, AF116575, AF116576, U37727, CY002360,
CY003672, CY003696, CY003761, CY002992, CY002352, CY002632, CY002656, CY002152, CY006107,
CY006387, CY006867, CY002664, CY006187, CY006395, CY006411, CY006403, CY006747, CY003368,
CY003769, CY001680, AB126622, AB126630, AJ457909, AJ457911, AJ457878, AJ457861, AJ457875, AJ457910,
AY684125, AF503473, AF503474, AF503476, AF503477, AF503478, AF503479, AF503480, AF503481, AF503482,
AF503483, AF503485, AF503486, AF503484, AF503475, D10163, L19005, L19006, L19008, L11125, L11133,
AY209988, AY209989, AY209978, AY209979, AY209980, AY209981, AY209982, AY209983, AY209984,
AY209985, AY209986, AY209987, AY209974, AY209975, AY209976, AY209977, D13579, D13580, AY209970,
AY209971, AY209972, AY209973, L11126, AY209967, AY209968, AY209969, AY209963, AY209964, AY209965,
AY209966, AY209959, AY209960, AY209961, AY209962, AY209955, AY209956, AY209957, AY209958,
AY209954, AF270721, L11134, AF270725, AF270726, AF270727, AF270723, AF270724, AB056699, J02127,
L11142, L20406, L20407, L20408, L20409, L20410, AY643085, AY643087, AY643086, AY209952, AY209953,
AF270716, AF270717, AF270718, AF270719, AF270720, AF270722, AF270728, DQ265709, DQ265716, CY002000,
CY002056, CY002184, CY003640, CY006076, CY006084, CY002072, CY002448, CY002456, CY006291,
CY002008, CY002032, CY002200, CY002464, CY003648, CY003344, CY002240, CY002488, CY002736,
CY002264, CY006123, CY003048, CY006139, CY006155, CY008628, CY008652, CY007795, CY007803,
CY007811, CY008340, CY008348, CY008356, CY008372, CY008380, CY008388, CY008396, CY008404,
CY008412, CY008420, CY008428, CY008436, CY008444, CY008564, CY008572, CY008580, CY008636,
CY008644, CY009028, CY009036, CY009044, CY003056, CY008620, CY002776, CY008556, CY008588,
CY008596, CY008604, CY008612, CY006131, CY002480, CY008364, CY006147, CY002720, CY002016,
DQ265707, DQ265708, DQ265710, DQ265711, DQ265712, DQ265713, DQ265714, DQ265715, DQ265717,
CY000257, CY002024, CY002064, CY002192, CY002592, DQ249261, DQ249262, CY000889, CY002040,
CY002176, CY002208, CY002216, CY002224, CY002232, CY002904, CY000033, CY000761, CY001229,
CY002048, CY002416, CY002600, CY006371, CY000369, CY002906, CY002914, CY002922, CY002946,
CY002930, CY006115, CY006179, CY003040, CY003664, CY006379, CY008164, CY002954, CY001029,
CY002408, CY002424, CY003032, CY002712, CY002760, CY002905, CY002938, CY003072, CY003656,
CY008516, CY002432, CY002256, CY002962, CY002248, CY002440, CY002584, CY007283, CY007459,
CY002728, CY002792, CY002288, CY006092, CY007387, CY003416, CY006435, CY007275, CY007291,
CY007299, CY007307, CY007315, CY007323, CY007331, CY007347, CY007371, CY007379, CY007427,
CY007435, CY007443, CY007451, CY007475, CY007483, CY007491, CY007507, CY007531, CY007539,
CY007547, CY007555, CY008188, CY008204, CY008212, CY008220, CY008228, CY008908, CY009252,
CY009260, CY009268, CY007419, CY007563, CY007643, CY008244, CY002280, CY007339, CY007355,
CY007363, CY007403, CY007499, CY007515, CY007571, CY007579, CY008236, CY008252, CY007395,
CY007523, CY007411, CY000561, CY002768, CY002784, CY002080, CY003336, CY002472, CY002504,
CY003408, CY002608, AY947474, AY963789, AY963790, AY963791, AY963792, AY963793, AY945263,
AY945264, AY945265, AY945266, AY945267, AY945268, AY945269, AY945270, AY945271, AY945272,
AY945273, AY945274, AY945275, AY945276, AY945277, AY945278, AY945279, AY945280, AY945281,
AY945282, AY945283, AY945284, AY945285, AY945286, AY945287, AY945288, CY000001, CY000065,
CY000097, CY000137, CY000161, CY000177, CY000265, CY000345, CY000361, CY000901, CY001064,
CY001632, DQ249259, CY000073, CY000089, CY000377, CY001405, CY000009, CY000025, CY000057,
CY000081, CY000121, CY000129, CY000145, CY000153, CY000169, CY000193, CY000353, CY000505,
CY000513, CY000753, CY000777, CY000909, CY000965, CY001013, CY001021, CY001045, CY001112,
CY001213, CY001512, CY000017, DQ089636, CY001285, DQ086160, CY000041, CY000105, CY000249,
CY000473, CY000785, CY000957, CY000973, CY001037, CY001053, CY001061, CY001221, CY002344,
DQ089635, CY000881, CY000949, CY001648, DQ089637, DQ089638, DQ089639, CY003680, CY001088,
CY000873, CY001293, CY007163, DQ086161, CY009020, CY001560, CY007003, CY007083, CY006859,
CY006923, CY006931, CY006939, CY006947, CY006955, CY006963, CY006971, CY006979, CY006987,
CY006995, CY007011, CY007019, CY007035, CY007043, CY007051, CY007059, CY007067, CY007091,
CY007099, CY007107, CY007115, CY007123, CY007131, CY007139, CY007147, CY007155, CY007187,
CY007195, CY007267, CY008876, CY008884, CY008892, CY008900, CY008916, CY009244, CY007179,
CY007235, CY008196, CY008548, CY008868, CY007027, CY001160, CY001421, CY001469, CY001544,
CY001640, CY002104, CY002520, CY007243, CY007075, CY007171, CY007203, CY007211, CY007219,
CY007227, CY007251, CY007259, CY001341, CY001712, CY008540, CY000049, CY000521, CY000865,
CY000917, CY001096, CY001205, CY001253, CY001461, CY001536, CY001552, CY001624, DQ089634,
CY000769, CY001373, DQ086159, AY531033, AY531039, AY531040, AY531041, AY531042, AY531043,
AY531044, AY531045, AY531046, AY531047, AY531048, AY531049, AY531050, AY531051, AY531052,
AY531053, AY531054, AY531055, AY531056, AY531057, AY531058, AY531059, AY531060, AY531061,
DQ059385, DQ086157, DQ086158, AY963783, AY963784, AY963785, AY963786, AY963787, AY963788,
AY963796, CY000113, CY000233, CY000241, CY000585, CY000793, CY000941, CY001080, CY003120,
CY003123, CY003136, CY003200, CY003777, CY000537, CY003104, CY003144, CY000209, CY000217,
CY000225, CY000281, CY000337, CY000425, CY000433, CY000441, CY000489, CY000497, CY000529,
CY001728, CY001736, CY003096, CY003192, CY001317, CY001333, CY003176, CY003112, CY003168,
CY003424, CY003152, CY000933, CY000289, CY000329, CY000545, CY000553, CY001152, CY001197,
CY001325, CY002128, CY003160, CY003184, CY003208, CY001301, CY001072, CY000313, CY001144,
DQ227423, CY007587, CY007595, CY007603, CY007651, CY007659, CY007667, CY007675, CY007683,
CY007691, CY007699, CY007707, CY007715, CY007723, CY007731, CY007739, CY007747, CY007755,
CY007763, CY007771, CY007779, CY007787, CY008284, CY008324, CY008332, CY001309, CY000625,
CY001437, CY008268, CY008276, CY008292, CY001944, CY008260, CY008316, CY000297, CY000393,
CY000401, CY000409, CY000417, CY000925, CY001104, CY001128, CY001184, CY001237, CY001261,
CY001429, CY008308, CY008300, DQ227431, DQ227424, DQ227425, DQ227426, DQ227427, AY589647,
AY589648, AY589649, AY589650, AY589651, AY589652, AY589653, AY589654, AY589655, AY589656,
AY589657, AY589658, AY589659, AY589660, AY589661, DQ227429, AY884276, AY884277, AY884278,
AY884279, AY884280, AY884281, AY884282, AY884283, AY884284, DQ227430, DQ227428, AY661030,
AY661031, AY947476, AY377129, AY968039, AY968037, AY968040, AY968038, AY968041, CY000584,
CY000481, CY000273, CY001168, CY002816, CY003088, CY001720, CY000185, CY000569, CY003080,
CY000385, CY000201, CY000305, CY000321, CY002328, AY661022, AY661023, AY661024, AY968029,
AY968030, AY968031, CY000609, CY003256, CY000465, CY000657, CY000665, CY000705, CY000713,
CY000737, CY000817, CY000849, CY000981, CY001245, CY001520, CY000997, CY001365, CY003240,
CY003448, CY003456, CY003825, CY003264, CY000449, CY000841, CY001277, CY001397, CY003248,
CY003272, CY003280, CY003809, CY003817, CY008844, CY000697, CY008492, CY000833, CY009140,
CY006659, CY008476, CY008484, CY008500, CY008508, CY008764, CY008780, CY008788, CY008796,
CY008804, CY008852, CY008860, CY009100, CY009116, CY009124, CY009132, CY009148, CY009156,
CY009164, CY008748, CY008756, CY008772, CY008820, CY008828, CY008836, CY009084, CY008812,
CY009076, CY000689, CY000809, CY001136, AY661021, AY968024, AY968023, AF382319, AF382320,
AF382321, AF382322, AF382323, AF382324, AF382325, AF382326, AF382327, AF382328, AY035588, AY035589,
AY035590, AY035591, AY035592, CY000593, CY001656, CY001688, CY001752, CY001768, CY001776,
CY001824, CY001832, CY001840, CY001856, CY001864, CY001872, CY001880, CY001888, CY001896,
CY001920, CY001928, CY001976, CY001984, CY002136, CY003608, CY003624, CY000601, CY001760,
CY001912, CY001992, CY002160, CY000457, CY000641, CY000649, CY000681, CY000721, CY000729,
CY000801, CY000825, CY001176, CY001576, CY001904, CY002296, CY002560, CY002576, CY003224,
CY003632, CY003592, CY001968, CY003232, CY000633, CY002168, CY001120, CY001413, CY001792,
CY001936, CY002112, CY002312, CY002336, CY002368, CY001744, CY003568, CY003584, CY003785,
CY003801, CY006060, CY006068, CY003576, CY003440, CY003600, CY000617, CY001453, CY003616,
CY000673, CY006899, CY001848, CY003793, CY001808, CY001005, CY001269, CY007635, CY009108,
CY003432, CY002552, CY000745, CY001664, CY000857, CY000989, CY001349, CY001357, CY001381,
CY001445, CY001528, CY001592, CY001600, CY001608, CY001616, CY002304, CY002512, CY003216,
CY001696, CY006163, CY001704, CY001960, CY002144, AY531035, AJ293926, AY963782, AY963794,
AY963795, AF315566, AF315564, AF315565, AY661019, AY661026, AY968020, AY968019, AY968021,
AB019355, AB019356, AF382318, AY032978, CY001816, CY003560, CY002376, CY001485, CY001493,
CY001784, CY001800, CY002384, CY001584, CY006283, CY008980, CY006515, CY008180, CY006251,
CY006459, CY006475, CY006483, CY006491, CY006499, CY006531, CY006539, CY006547, CY006555,
CY006563, CY006571, CY006579, CY006587, CY006595, CY006603, CY006619, CY006635, CY006771,
CY006787, CY006795, CY008940, CY008948, CY008956, CY008964, CY008972, CY001504, CY002544,
CY006803, CY008532, CY008924, CY002120, CY001672, CY001477, CY001568, AY271794, AF316818,
AF316820, AF316821, AF316819, AF315560, AF315563, AF315571, AF316817, AF315561, AY661206, AY661207,
AY661208, AY661209, AF315559, AF315562, CY006227, CY006243, CY006467, CY006507, CY006451,
CY006235, CY006259, CY006275, CY006443, CY006523, CY006611, CY006627, CY008932, CY006267,
AF363502, AF363503, AF363504, AJ311466, AF315567, AF315569, AF315570, AF315568, AY661201, AY661202,
AY661203, AY661205, AY661210, AF017272, AY661193, AY661194, AY661195, AY661197, AY661198,
AY661199, AY661200, AF131996, AF131997, AF131998, AF017270, AF017271, AB019354, AB019357,
CY002272, AF534013, AF534014, AF534015, AF534016, AF534017, AF534018, AY661181, AY661182, AY661183,
AY661185, AY661186, AY661187, AY661188, AY661189, AY661190, AY661191, AY661192, AY661196, U48444,
U48445, U48447, U65553, U65554, U65555, U65556, U65557, U65558, U65559, U65560, CY006331, CY006339,
CY003752, AY661020, AY661176, AY661175, AY661177, AY661178, AY661179, AY661204, AY661180, Z46403,
Z46404, Z46405, Z46407, Z46408, AB043708, U48439, U48440, U48441, U48442, U48443, U48446, U65552,
CY006347, CY009012, AY661131, AY661132, AY661133, AY661139, AY661140, AY661141, AY661142,
AY661143, AY661144, AY661145, AY661146, AY661147, AY661148, AY661149, AY661150, AY661151,
AY661152, AY661153, AY661154, AY661155, AY661156, AY661157, AY661158, AY661159, AY661161,
AY661162, AY661163, AY661165, AY661166, AY661167, AY661168, AY661169, AY661170, AY661171,
AY661172, AY661173, AY661174, AY661211, D30669, D30668, Z46393, Z46394, Z46395, Z46396, Z46397,
Z46398, Z46399, Z46400, Z46401, Z46402, Z46406, Z46411, Z46412, Z46413, Z46414, Z46415, Z46416, Z46417,
AB043707, AY661160, AY661164, CY003712, U26830, AY661080, AY661082, AY661083, AY661084, AY661085,
AY661086, AY661087, AY661088, AY661089, AY661090, AY661091, AY661092, AY661093, AY661094,
AY661095, AY661096, AY661097, AY661108, AY661109, AY661110, AY661111, AY661112, AY661113,
AY661114, AY661115, AY661116, AY661117, AY661118, AY661120, AY661121, AY661122, AY661123,
AY661124, AY661126, AY661127, AY661128, AY661129, AY661130, AY661134, AY661135, AY661136,
AY661137, AY661138, D30665, D30664, Z46392, Z46410, AB043706, AY661125, AY661081, D30663, AY661075,
AY661076, AY661077, AY661078, AY661079, AY661098, AY661099, AY661100, AY661101, AY661102,
AY661103, AY661104, AY661105, AY661106, AY661107, AY661119, D30662, AB043705, D49967, CY003064,
CY008740, AY661073, D49966, AY661069, AY661070, AY661072, AY661074, Z46409, D49965, U97740,
AY661059, AY661066, D49961, AY661029, AY661057, AY661058, AY661060, AY661061, AY661062, AY661063,
AY661064, AY661065, AY661067, AY661068, AY661071, X75800, D49962, Z46391, D49963, D49960, D49964,
AJ252129, AJ252131, CY003512, CY008724, CY008732, CY003352, AY661054, AY661055, AY661056, AF204238,
CY003544, M57644, D49959, CY002088, CY002752, CY008716, AY661053, M21648, M57632, CY003520,
CY003536, CY003504, CY008668, CY008708, CY009068, CY008452, AY661049, AY661050, AY661051,
AY661052, AF405211, M57631, CY006323, CY008172, CY003744, CY006851, CY003736, CY006315, CY003720,
CY009052, AY661016, AF201845, AF201846, AF405209, AF405210, AF405207, CY006052, CY006755, U08858,
U08859, U08905, AY661015, AY661025, AY661048, AF233691, CY007627, AY661014, AF201844, AF405206,
M57630, CY006043, CY003488, CY008468, CY006203, CY008660, CY006891, CY007619, AY661046, AY661047,
AF405212, J02092, AF201843, CY006691, CY006699, CY006707, CY007611, X05907, CY006763, CY006731,
CY006739, CY006843, AY661011, AY661012, AY661013, AY661045, AF450246, CY006723, CY006835,
CY006883, CY008692, CY008700, CY009060, AY661006, AY661007, AY661008, AY661010, AY661044,
AY661009, V01086, CY006044, CY003728, AY661043, AY661028, CY006907, CY003496, CY006715, CY006819,
CY006827, AY661042, AY661005, AY661017, AY661018, AY661027, CY003528, CY009004, CY006811,
AY661002, AY661003, AY661004, AF201842, M54895, CY002744, CY002096, CY003552, CY006307, CY008460,
CY008676, CY008684, AY661041, V01089, AY660999, AY661000, AY661001, AF201875, J02132, CY002496,
CY006683, CY006219, AY660996, AY660997, AY660998, AY660995, AY660994, CY006299, AY660992,
AY660993, AY661040, J02135, V01085, V01103, M55059, CY008156, AF348176, AF348177, AF348178,
AF348179, CY006211, AY660991, AY661038, AY661039, AF201874, AB239125, DQ372591, AY555153,
AY555150, AJ867074, AY818135, AY679514, AY651334, AY651335, AY651333, AY651336, AJ715872,
AY720950, AB212054, AY575869, AY575870, AF102676, AF028709, AF046088, AF046096, AF046097, AF046098,
AF036356, AF084279, AF084280, AF084281, AF084532, AF102671, AF102672, AF102673, AF102674, AF102675,
AF102677, AF102678, AF102679, AF102680, AF102681, AF102682, AF028020, DQ226106, AJ404626, AJ404627,
AY043019, AY043015, AY043017, AY043018

TABLE 1-5
GenBank accession numbers for NP sequences (segment 5) used in this
analysis.

CY007470, CY002811, CY002683, CY002691, CY003379, CY003691, CY003707, CY002707, CY003299,
CY002539, CY002627, CY006430, CY006918, CY008999, CY006198, CY003387, CY006670, CY008527,
CY002987, CY002531, CY006678, CY003307, CY001955, CY002571, CY003403, CY003475, CY006174,
CY003011, CY003395, CY003291, CY002803, CY003836, CY003315, CY003467, CY002675, CY003003,
CY003027, CY006878, CY003483, CY002699, CY003323, CY008151, CY006366, CY009239, CY002395,
CY002403, CY003019, CY006782, CY003331, CY006358, CY002619, CY006422, CY002651, CY002643,
CY009175, CY009183, CY009199, CY009223, CY009231, CY009191, CY009207, AF258516, AF342819,
AF258517, DQ249264, AF398867, L24394, CY009319, Z54292, M63755, M76602, M76610, Z54291, Z54290,
AJ628066, M59329, M59330, M59331, M59332, M59333, M59334, X51972, D00599, D00600, D00603, CY009287,
CY009295, M63754, M76605, M76606, M76604, CY008991, CY009367, M63751, CY009343, D00601, CY009335,
M63750, U02086, M63749, AF389119, M30746, AY744935, CY002355, CY002659, CY006750, CY003675,
CY006390, CY002363, CY002155, CY006414, CY006406, CY006190, CY002667, CY003699, CY006110,
CY006870, CY003764, CY002995, CY006398, CY002635, CY001683, CY003772, CY003371, AB126624,
AB126632, M63753, AY210103, AY210104, AY210093, AY210094, AY210095, AY210096, AY210097, AY210098,
AY210099, AY210100, AY210101, AY210102, AY210089, AY210090, AY210091, AY210092, AY210085,
AY210086, AY210087, AY210088, AY210082, AY210084, AY210081, AY210083, AY210077, AY210078,
AY210079, AY210080, AY210075, AY210076, M23976, AY210074, AY210072, AY210073, AY210070, AY210071,
M81571, M81577, M81583, M63752, AY210066, AY210067, AY210068, AY210069, CY002003, CY002011,
CY002467, CY006079, CY002059, CY006087, CY003643, CY003651, CY002451, CY002723, CY002459,
CY002019, CY002075, CY002491, CY006294, CY003051, CY002203, CY002267, CY003059, CY006142,
CY002779, CY008359, CY007798, CY007806, CY007814, CY008343, CY008351, CY008367, CY008375,
CY008383, CY008391, CY008399, CY008407, CY008415, CY008423, CY008431, CY008439, CY008447,
CY008567, CY008575, CY008583, CY008591, CY008615, CY008631, CY008639, CY008647, CY008655,
CY009031, CY009039, CY009047, CY002187, CY006150, CY008559, CY008599, CY008607, CY008623,
CY002483, CY006134, CY006126, CY002739, CY006158, CY002035, CY002243, CY003347, CY000036,
CY000372, CY000564, CY000764, CY001032, CY001232, CY002051, CY002067, CY002043, CY002195,
CY002227, CY002595, CY002925, CY002933, CY002949, CY002979, CY000260, CY006382, CY002771,
CY002941, CY002179, CY002235, CY002251, CY002259, CY002611, CY002731, CY002909, CY002715,
CY002763, CY002957, CY002965, CY002972, CY003075, CY006118, CY008167, CY002917, CY000892,
CY002027, CY007446, CY002219, CY003659, CY003667, CY006095, CY006374, CY006438, CY002787,
CY003043, CY003339, CY003411, CY008519, CY002427, CY006182, CY007326, CY008911, CY009255,
CY007454, CY008207, CY008223, CY007374, CY007478, CY007558, CY009263, CY002587, CY007278,
CY007286, CY007294, CY007302, CY007310, CY007334, CY007350, CY007382, CY007390, CY007430,
CY007438, CY007462, CY007486, CY007494, CY007518, CY007534, CY007542, CY007550, CY007582,
CY008215, CY008231, CY002211, CY007318, CY007342, CY007358, CY007366, CY007398, CY007406,
CY007414, CY007502, CY007526, CY007566, CY007574, CY007646, CY008191, CY008239, CY008247,
CY008255, CY009271, CY002435, CY007422, CY002507, CY002411, CY002419, CY003419, CY002795,
CY007510, CY002475, CY002291, CY002443, CY002603, CY003035, CY002283, CY002083, CY000780,
CY000756, CY000004, CY000020, CY000044, CY000060, CY000068, CY000076, CY000084, CY000092,
CY000100, CY000132, CY000148, CY000156, CY000164, CY000172, CY000180, CY000196, CY000268,
CY000348, CY000356, CY000364, CY000380, CY000476, CY000508, CY000520, CY000788, CY000904,
CY000912, CY000920, CY000960, CY000968, CY001024, CY001040, CY001048, CY001056, CY001067,
CY001091, CY001099, CY001115, CY001208, CY001216, CY001224, CY001296, CY001408, CY001635,
CY001651, CY002347, CY000028, CY000524, CY001016, CY000012, CY000052, CY000252, CY001192,
CY000108, CY001288, CY001715, CY000140, CY001515, CY001627, CY002523, CY001424, CY003683,
CY007142, CY000124, CY000772, CY001344, CY006862, CY000952, CY008551, CY000976, CY007118,
CY007006, CY007070, CY007102, CY007198, CY006926, CY006934, CY006942, CY006966, CY007022,
CY007054, CY007110, CY007270, CY006958, CY007014, CY007046, CY007062, CY007078, CY007086,
CY007094, CY007126, CY007166, CY007174, CY008543, CY009023, CY006950, CY006974, CY006982,
CY006990, CY006998, CY007134, CY007150, CY007190, CY007262, CY008895, CY008903, CY009247,
CY001563, CY007030, CY007182, CY007206, CY007214, CY007222, CY007230, CY007238, CY007246,
CY007254, CY008199, CY008879, CY008887, CY008919, CY001163, CY001555, CY007158, CY001472,
CY008871, CY002107, CY000868, CY001376, CY000876, CY000884, CY001256, CY001464, CY001539,
CY001547, CY001643, CY007038, CY000116, CY000212, CY000220, CY000228, CY000236, CY000244,
CY000292, CY000300, CY000316, CY000332, CY000340, CY000420, CY000428, CY000436, CY000444,
CY000492, CY000500, CY000532, CY000548, CY000556, CY000588, CY000628, CY000796, CY000944,
CY001083, CY001147, CY001155, CY001320, CY001336, CY001731, CY001739, CY002131, CY003099,
CY003115, CY003124, CY003130, CY003155, CY003203, CY003427, CY003179, CY003195, CY000284,
CY001131, CY001312, CY003107, CY003780, CY001240, CY003187, CY003147, CY003139, CY000540,
CY000396, CY000404, CY000928, CY001075, CY001107, CY001187, CY001200, CY001432, CY003171,
CY001440, CY003163, CY003211, CY007774, CY001947, CY007694, CY001264, CY007742, CY007750,
CY007758, CY007766, CY007590, CY007598, CY007606, CY007654, CY007662, CY007670, CY007678,
CY007686, CY007702, CY007710, CY007718, CY007726, CY007734, CY007782, CY007790, CY008287,
CY008327, CY008263, CY008271, CY008279, CY008303, CY008311, CY008319, CY008335, CY001328,
CY000936, CY001304, CY000412, CY008295, CY001171, CY000188, CY000204, CY000276, CY000324,
CY000388, CY000484, CY000572, CY000579, CY002331, CY002819, CY003091, CY001723, CY003083,
CY000308, CY000452, CY000468, CY000612, CY000660, CY000668, CY000692, CY000700, CY000708,
CY000716, CY000740, CY000836, CY000852, CY001248, CY001400, CY001523, CY000844, CY003459,
CY003259, CY003243, CY000984, CY001000, CY000820, CY000812, CY001280, CY003451, CY003251,
CY003267, CY003275, CY003283, CY003820, CY003828, CY001368, CY003812, CY009167, CY006662,
CY008783, CY008791, CY008799, CY008807, CY008815, CY008855, CY009103, CY009119, CY009127,
CY009135, CY009159, CY008479, CY008487, CY008503, CY008511, CY008823, CY008831, CY008847,
CY008863, CY009087, CY009143, CY009151, CY008495, CY008751, CY008759, CY008767, CY008775,
CY009079, CY008839, CY001139, CY000604, CY001579, CY001763, CY000460, CY000636, CY000644,
CY000652, CY000676, CY000732, CY001123, CY001416, CY001667, CY001691, CY001747, CY001755,
CY001771, CY001811, CY001875, CY001883, CY001891, CY001899, CY001915, CY001923, CY001931,
CY001979, CY001987, CY002163, CY002371, CY003579, CY003595, CY003611, CY003619, AJ458276,
CY000596, CY000724, CY000804, CY002115, CY000684, CY001995, CY002579, AJ293924, CY003571,
CY003627, CY003635, CY003603, CY006071, CY001595, CY001659, CY001699, CY001779, CY001827,
CY001843, CY001859, CY001867, CY002139, CY002339, CY001851, CY000620, CY000828, CY000860,
CY000992, CY002299, CY002315, CY002563, CY006166, CY001352, CY001907, CY001939, CY001971,
CY001272, CY001619, CY003219, CY003435, CY003788, CY003796, CY003804, CY003227, CY003587,
CY003443, CY006063, CY006902, CY002171, CY001707, CY001795, CY001835, CY009111, CY007638,
CY001179, CY002555, CY003235, CY000748, CY001008, CY001603, CY001963, CY002515, CY001456,
CY002147, CY001611, CY001384, CY001360, CY001448, CY002307, CY001531, CY001496, CY001587,
CY001803, CY002379, CY002387, CY003563, AB019359, AB019360, CY001488, CY001507, CY001819,
CY001571, CY001675, CY002123, CY006254, CY006574, CY006774, CY008943, CY006462, CY006494,
CY006550, CY006558, CY006638, CY006286, CY006478, CY006486, CY006502, CY006518, CY006534,
CY006542, CY006566, CY006582, CY006590, CY006598, CY006606, CY006622, CY006798, CY006806,
CY008183, CY008535, CY008927, CY008951, CY008959, CY008967, CY008975, CY008983, CY006790,
CY001787, CY001480, CY002547, AF255748, AF255749, AJ458277, CY006454, CY006614, CY006630, CY008935,
CY006230, CY006238, CY006246, CY006262, CY006270, CY006278, CY006446, CY006470, CY006510,
CY006526, AF038259, AF483604, AF038256, AF038257, AF038258, AB019358, AB019361, CY002275, AF038255,
U71145, U71146, U71147, CY006342, CY003755, CY006334, U71144, AY936880, CY006350, CY009015,
AF038254, CY003715, L07357, CY008743, CY003067, L07356, L07355, L07353, L07354, L07372, L07373, L07374,
L07369, L07370, CY003515, CY003355, CY008727, CY008735, L07368, L07371, L07366, L07367, CY003547,
L07365, CY002091, CY008719, CY002755, CY003523, CY003539, L07364, CY003507, CY008455, CY008671,
CY008711, CY009071, L07362, L07363, CY006326, CY008175, CY003747, M22577, CY003739, CY006318,
CY003723, CY006854, CY009055, CY006055, CY006758, CY007630, L07352, L07360, L07361, CY003491,
CY006102, CY008663, CY008471, CY006206, CY006894, CY007622, L07350, L07351, CY006694, CY006702,
CY006710, CY007614, D00602, L07359, CY006742, CY006734, CY006766, CY006846, L07349, CY006726,
CY006838, CY006886, CY008695, CY008703, CY009063, AF072545, CY006047, L07358, CY003731, CY003499,
CY006910, CY006822, CY006718, CY006830, L07346, L07347, CY003531, CY009007, CY006814, CY002099,
D00051, L07345, CY003555, CY002747, CY006310, CY008463, CY008687, CY008679, L07342, L07343, L07344,
AY210234, AY210235, AY210236, AY210237, AY210238, CY006222, CY002499, L07341, CY006686, AY210230,
AY210231, AY210232, AY210233, AY210226, AY210227, AY210228, AY210229, CY006302, AY210221,
AY210222, AY210223, AY210224, AY210225, J02137, CY008159, AF348180, AF348183, CY006214, L07340,
AF348181, AY210207, AY210208, AY210209, AY210210, AY210211, AY210212, AY210213, AY210214,
AY210215, AY210216, AY210217, AY210218, AY210219, AY210220, AF348182, AY936881, DQ372594,
DQ360840, DQ099781, DQ099783, DQ099782, DQ099780, DQ099779, DQ099775, AJ867076, AY818138,
DQ099776, AY651498, AY651499, AY651501, AY651500, AB212055, AY575905, AY575906, AF255753,
AF036359, AF255744, AF255745, AF255746, AF255747, AF255750, AF255751, AF255752, AJ289873, AJ291400,
AJ291401, AF028710, AF046092, AF084276, AF084277, AF084278, AF115284, AF115285, DQ226139, AF255742,
AF255743, AJ289872, AJ289871, AY043026

TABLE 1-6
GenBank accession numbers for NA sequences (segment 6) used in this analysis.

CY007469, CY002538, CY002626, CY002682, CY002690, CY002706, CY002810, CY002986, CY003298,
CY003378, CY003386, CY003690, CY003706, CY006197, CY006429, CY006669, CY006917, CY008526,
CY008998, AJ518100, AJ518101, AY297140, AY297141, AY297142, AY297143, AY297144, AY297145,
AY297146, AY297147, AY297148, AY297149, AY297150, AY297151, AY297152, AY297153, AY310407,
AY310408, AY310409, AY310410, AY310411, AY310412, CY002530, CY003306, CY006677, DQ249254,
DQ249256, DQ249258, AJ518091, CY001954, CY002394, CY002402, CY002570, CY002618, CY002674,
CY002698, CY002802, CY003002, CY003010, CY003018, CY003026, CY003290, CY003314, CY003322,
CY003330, CY003394, CY003402, CY003466, CY003474, CY003482, CY003835, CY006173, CY006357,
CY006365, CY006421, CY006781, CY006877, CY008150, CY009238, AJ518093, AJ518095, CY002642, CY002650,
CY009174, CY009182, CY009190, CY009198, CY009206, CY009222, CY009230, AJ518092, DQ249252,
AF342820, AJ518098, AJ518096, AJ518099, AY904335, AF398868, AF398869, AF398872, AJ518097, AJ518104,
U53166, D31945, CY009318, D31950, D31944, D31948, AJ006954, X15281, AF494254, M38335, CY009286,
CY009294, K02018, M38309, AF250363, M27970, CY008990, CY009366, CY009342, CY009334, AF250357,
AF494253, AY122327, DQ345546, Y14193, AF250365, AF494252, AY122326, AF389120, NC_002018, J02177,
L25815, L25816, L25817, AF250356, CY002154, CY002354, CY002362, CY002634, CY002658, CY002666,
CY002994, CY003674, CY003698, CY003763, CY006109, CY006189, CY006389, CY006397, CY006405,
CY006413, CY006749, CY006869, AB126623, AB126631, AJ457943, AJ489848, AJ489849, AJ489850, AJ489851,
CY001682, CY003370, CY003771, AF503463, AF503464, AF503465, AF503466, AF503467, AF503468, AF503469,
AF503470, AF503471, AF503472, AJ457944, AJ489846, AJ489847, D10164, AB101673, AB124657, AY209932,
AY209933, AY209922, AY209923, AY209924, AY209925, AY209926, AY209927, AY209928, AY209929,
AY209930, AY209931, K01393, AY209918, AY209919, AY209920, AY209921, AY209914, AY209915, AY209916,
AY209917, AB101672, AB124656, AY209912, AY209913, AY209910, AY209911, AY209906, AY209907,
AY209908, AY209909, AY209904, AY209905, AB124655, AY209903, AY209901, AY209902, AY209899,
AY209900, AB101671, AB124653, AB124654, AY209895, AY209896, AY209897, AY209898, AY643088,
AY643089, J02156, L37329, L37330, L37331, CY002002, CY002010, CY002018, CY002034, CY002058,
CY002074, CY002186, CY002202, CY002242, CY002266, CY002450, CY002458, CY002466, CY002482,
CY002490, CY002722, CY002738, CY002778, CY003050, CY003058, CY003346, CY003642, CY003650,
CY006078, CY006086, CY006125, CY006133, CY006141, CY006149, CY006157, CY006293, CY007797,
CY007805, CY007813, CY008342, CY008350, CY008358, CY008366, CY008374, CY008382, CY008390,
CY008398, CY008406, CY008414, CY008422, CY008430, CY008438, CY008446, CY008558, CY008566,
CY008574, CY008582, CY008590, CY008598, CY008606, CY008614, CY008622, CY008630, CY008638,
CY008646, CY008654, CY009030, CY009038, CY009046, CY000035, CY000259, CY000371, CY000563,
CY000763, CY000891, CY001031, CY001231, CY002026, CY002042, CY002050, CY002066, CY002082,
CY002178, CY002194, CY002210, CY002218, CY002226, CY002234, CY002250, CY002258, CY002282,
CY002290, CY002410, CY002418, CY002426, CY002434, CY002442, CY002474, CY002506, CY002586,
CY002594, CY002602, CY002610, CY002714, CY002730, CY002762, CY002770, CY002786, CY002794,
CY002908, CY002916, CY002924, CY002932, CY002940, CY002948, CY002956, CY002964, CY002971,
CY002978, CY003034, CY003042, CY003074, CY003338, CY003410, CY003418, CY003658, CY003666,
CY006094, CY006117, CY006181, CY006373, CY006381, CY006437, CY007277, CY007285, CY007293,
CY007301, CY007309, CY007317, CY007325, CY007333, CY007341, CY007349, CY007357, CY007365,
CY007373, CY007381, CY007389, CY007397, CY007405, CY007413, CY007421, CY007429, CY007437,
CY007445, CY007453, CY007461, CY007477, CY007485, CY007493, CY007501, CY007509, CY007517,
CY007525, CY007533, CY007541, CY007549, CY007557, CY007565, CY007573, CY007581, CY007645,
CY008166, CY008190, CY008206, CY008214, CY008222, CY008230, CY008238, CY008246, CY008254,
CY008518, CY008910, CY009254, CY009262, CY009270, DQ249255, DQ249257, AY531006, AY531007,
AY531008, AY531009, AY531010, AY531011, AY531012, AY531013, AY531014, AY531015, AY531016,
AY531017, AY531018, AY531019, AY531020, AY531021, AY531022, AY531023, AY531024, AY531025,
AY531026, AY531027, AY531028, AY531034, CY000003, CY000011, CY000019, CY000027, CY000043,
CY000051, CY000059, CY000067, CY000075, CY000083, CY000091, CY000099, CY000107, CY000123,
CY000131, CY000139, CY000147, CY000155, CY000163, CY000171, CY000179, CY000195, CY000251,
CY000267, CY000347, CY000355, CY000363, CY000379, CY000475, CY000507, CY000515, CY000523,
CY000755, CY000771, CY000779, CY000787, CY000867, CY000875, CY000883, CY000903, CY000911,
CY000919, CY000951, CY000959, CY000967, CY000975, CY001015, CY001023, CY001039, CY001047,
CY001055, CY001063, CY001066, CY001090, CY001098, CY001114, CY001162, CY001207, CY001215,
CY001223, CY001255, CY001287, CY001295, CY001343, CY001375, CY001407, CY001423, CY001463,
CY001471, CY001514, CY001538, CY001546, CY001554, CY001562, CY001626, CY001634, CY001642,
CY001650, CY001714, CY002106, CY002346, CY002522, CY003682, CY006861, CY006925, CY006933,
CY006941, CY006949, CY006957, CY006965, CY006973, CY006981, CY006989, CY006997, CY007005,
CY007013, CY007021, CY007029, CY007037, CY007045, CY007053, CY007061, CY007069, CY007077,
CY007085, CY007093, CY007101, CY007109, CY007117, CY007125, CY007133, CY007141, CY007149,
CY007157, CY007165, CY007173, CY007181, CY007189, CY007197, CY007205, CY007213, CY007221,
CY007229, CY007237, CY007245, CY007253, CY007261, CY007269, CY008198, CY008542, CY008550,
CY008870, CY008878, CY008886, CY008894, CY008902, CY008918, CY009022, CY009246, DQ059384,
DQ090706, DQ090707, DQ090708, DQ090709, DQ090710, DQ091199, AY589662, AY589663, AY589664,
AY589665, AY589666, AY589667, AY589668, AY589669, AY589670, AY589671, AY589672, AY589673,
AY589674, AY589675, AY589676, CY000115, CY000211, CY000219, CY000227, CY000235, CY000243,
CY000283, CY000291, CY000299, CY000315, CY000331, CY000339, CY000395, CY000403, CY000411,
CY000419, CY000427, CY000435, CY000443, CY000491, CY000499, CY000531, CY000539, CY000547,
CY000555, CY000587, CY000627, CY000795, CY000927, CY000935, CY000943, CY001074, CY001082,
CY001106, CY001130, CY001146, CY001154, CY001186, CY001199, CY001239, CY001263, CY001303,
CY001311, CY001319, CY001327, CY001335, CY001431, CY001439, CY001730, CY001738, CY001946,
CY002130, CY003098, CY003106, CY003114, CY003122, CY003129, CY003138, CY003146, CY003154,
CY003162, CY003170, CY003178, CY003186, CY003194, CY003202, CY003210, CY003426, CY003779,
CY007589, CY007597, CY007605, CY007653, CY007661, CY007669, CY007677, CY007685, CY007693,
CY007701, CY007709, CY007717, CY007725, CY007733, CY007741, CY007749, CY007757, CY007765,
CY007773, CY007781, CY007789, CY008262, CY008270, CY008278, CY008286, CY008294, CY008302,
CY008310, CY008318, CY008326, CY008334, DQ227446, U42776, AJ457958, AJ457959, AJ457960, AJ457961,
CY000187, CY000203, CY000275, CY000307, CY000323, CY000387, CY000483, CY000571, CY000578,
CY001170, CY001722, CY002330, CY002818, CY003082, CY003090, DQ249253, AJ307599, AJ307600, AJ307601,
AJ307602, AJ307603, AJ307604, AJ307605, AJ307606, AJ307607, AJ307608, AJ307609, AJ307610, AJ307611,
AJ307612, AJ307613, AJ307614, AJ307615, AJ307616, AJ307617, AJ307618, AJ307619, AJ307620, AJ307621,
AJ307622, AJ307623, AJ307624, AJ307625, AJ307626, AJ307627, AJ307628, AJ307629, AJ457933, AJ457934,
AJ457956, AJ457957, AJ457962, AJ457963, CY000451, CY000467, CY000611, CY000659, CY000667, CY000691,
CY000699, CY000707, CY000715, CY000739, CY000811, CY000819, CY000835, CY000843, CY000851,
CY000983, CY000999, CY001138, CY001247, CY001279, CY001367, CY001399, CY001522, CY003242,
CY003250, CY003258, CY003266, CY003274, CY003282, CY003450, CY003458, CY003811, CY003819,
CY003827, CY006661, CY008478, CY008486, CY008494, CY008502, CY008510, CY008750, CY008758,
CY008766, CY008774, CY008782, CY008790, CY008798, CY008806, CY008814, CY008822, CY008830,
CY008838, CY008846, CY008854, CY008862, CY009078, CY009086, CY009102, CY009118, CY009126,
CY009134, CY009142, CY009150, CY009158, CY009166, AF316808, AF316810, AF382329, AF382330, AF382331,
AF382332, AF386761, AF386762, AF386763, AF386764, AF534001, AJ293923, AJ457931, AJ457935, AJ457936,
AJ457937, AJ457938, AJ457964, AJ457965, AJ457966, AY531036, CY000459, CY000595, CY000603, CY000619,
CY000635, CY000643, CY000651, CY000675, CY000683, CY000723, CY000731, CY000747, CY000803,
CY000827, CY000859, CY000991, CY001007, CY001122, CY001178, CY001271, CY001351, CY001359,
CY001383, CY001415, CY001447, CY001455, CY001530, CY001578, CY001594, CY001602, CY001610,
CY001618, CY001658, CY001666, CY001690, CY001698, CY001706, CY001746, CY001754, CY001762,
CY001770, CY001778, CY001794, CY001810, CY001826, CY001834, CY001842, CY001850, CY001858,
CY001866, CY001874, CY001882, CY001890, CY001898, CY001906, CY001914, CY001922, CY001930,
CY001938, CY001962, CY001970, CY001978, CY001986, CY001994, CY002114, CY002138, CY002146,
CY002162, CY002170, CY002298, CY002306, CY002314, CY002338, CY002370, CY002514, CY002554,
CY002562, CY002578, CY003218, CY003226, CY003234, CY003434, CY003442, CY003570, CY003578,
CY003586, CY003594, CY003602, CY003610, CY003618, CY003626, CY003634, CY003787, CY003795,
CY003803, CY006062, CY006070, CY006165, CY006901, CY007637, CY009110, AF316805, AF316815,
AF316816, AF533730, AF533731, AF533732, AF533733, AF533734, AF533735, AF533736, AF533737, AF533738,
AF533739, AF533740, AF533741, AF533742, AF533743, AF533744, AF533745, AF533746, AF533747, AF533748,
AF533749, AF533750, AJ316063, AJ457932, AJ457939, AJ457940, AJ457941, AY271795, CY001479, CY001487,
CY001495, CY001506, CY001570, CY001586, CY001674, CY001786, CY001802, CY001818, CY002122,
CY002378, CY002386, CY002546, CY003562, CY006253, CY006285, CY006461, CY006477, CY006485,
CY006493, CY006501, CY006517, CY006533, CY006541, CY006549, CY006557, CY006565, CY006573,
CY006581, CY006589, CY006597, CY006605, CY006621, CY006637, CY006773, CY006789, CY006797,
CY006805, CY008182, CY008534, CY008926, CY008942, CY008950, CY008958, CY008966, CY008974,
CY008982, AF038264, AF330819, AF533999, AF534000, AJ291403, CY006229, CY006237, CY006245, CY006261,
CY006269, CY006277, CY006445, CY006453, CY006469, CY006509, CY006525, CY006613, CY006629,
CY008934, AF038262, AF038263, AF038265, AF533995, AF533996, AF533997, AF533998, AJ457942, AF038261,
AF533989, AF533990, AF533991, AF533992, AF533993, AF533994, AJ457945, CY002274, U51245, U51246,
U51247, U71141, U71142, U71143, AJ457946, CY003754, CY006333, CY006341, U43422, U43423, U43424,
U43425, U43426, U71140, AF038260, CY006349, CY009014, U42777, U42778, U42779, U42780, U43417, U43418,
U43419, U43420, U43421, CY003714, U42770, U42771, U42772, U42773, U42774, U42775, U43427, U42637,
CY003066, CY008742, U42636, U42635, CY003354, CY003514, CY008726, CY008734, U42634, CY003546,
U42633, CY002090, CY002754, CY008718, CY003506, CY003522, CY003538, CY008454, CY008670, CY008710,
CY009070, U42632, CY003746, CY006325, CY008174, CY003722, CY003738, CY006317, CY006853, CY009054,
AB124664, CY006054, CY006757, CY007629, CY003490, CY006101, CY006205, CY006893, CY007621,
CY008470, CY008662, K01150, CY006693, CY006701, CY006709, CY007613, AB124662, AB124663, CY006733,
CY006741, CY006765, CY006845, AB124661, CY006725, CY006837, CY006885, CY008694, CY008702,
CY009062, CY003730, CY006046, CY003498, CY006717, CY006821, CY006829, CY006909, AB124660,
CY003530, CY006813, CY009006, AB124659, AY210132, AY210133, AY210134, AY210135, AY210136,
CY002098, CY002746, CY003554, CY006309, CY008462, CY008678, CY008686, J02168, AB101675, AY210128,
AY210129, AY210130, AY210131, CY002498, CY006221, CY006685, U42631, AY210124, AY210125, AY210126,
AY210127, AY210119, AY210120, AY210121, AY210122, AY210123, CY006301, AB101674, AB124658,
AF348184, AF348185, AF348186, AF348187, AY210105, AY210106, AY210107, AY210108, AY210109,
AY210110, AY210111, AY210112, AY210113, AY210114, AY210115, AY210116, AY210117, AY210118,
CY006213, CY008158, J02136, U42630, AB239126, AY555151, AB212056, AY575881, AF028708, AF036357,
DQ226128, AJ404628, AJ404629, AY043024

TABLE 1-7
GenBank accession numbers for MP sequences (segment 7) used in this analysis.

AJ298948, X59240, DQ299489, CY007468, CY002985, CY002537, CY002625, CY002681, CY002705, CY002809,
CY003297, CY003385, CY003689, CY008525, CY003377, CY008997, CY002689, CY003705, CY006196,
CY006668, CY006916, CY006428, DQ249267, CY002529, CY006676, CY003305, CY001953, CY002569,
CY003025, CY003473, CY006780, CY006876, CY002393, CY002401, CY002617, CY002673, CY002697,
CY002801, CY003009, CY003017, CY003289, CY003313, CY003321, CY003465, CY003481, CY003834,
CY006356, CY006364, CY006420, CY008149, CY003329, CY003401, CY003393, CY006172, CY003001,
CY009237, CY002649, CY002641, CY009173, CY009181, CY009189, CY009197, CY009229, CY009205,
CY009221, AF258523, AF342818, AF258522, DQ249265, AF398876, U53168, U53169, CY009317, M63521,
AJ298947, M54941, X53029, CY009285, CY009293, CY008989, CY009365, CY009341, CY009333, X08091,
U02084, AF389121, NC_002016, L25814, L25818, M19374, M23920, X08088, X08089, AY130766, CY002353,
CY002361, CY006388, CY002993, CY002665, CY002657, CY006868, CY002153, CY002633, CY003673,
CY003697, CY003762, CY006188, CY006404, CY006748, CY006396, CY006412, CY006108, CY001681,
CY003770, AB126629, AB126637, CY003369, AF231358, AF231359, M63531, AY210065, AY210055, AY210056,
AY210057, AY210058, AY210059, AY210060, AY210061, AY210062, AY210063, AY210064, AY210051,
AY210052, AY210053, AY210054, AY210047, AY210048, AY210049, AY210050, AY210044, AY210045,
AY210046, AY210041, AY210042, AY210043, AY210037, AY210038, AY210039, AY210040, AY210035,
AY210036, M23978, AY210032, AY210033, AY210034, AY210030, AY210031, M81570, M81576, M81582,
AY210026, AY210027, AY210028, AY210029, X08093, CY002009, CY002033, CY002057, CY002073, CY002185,
CY002201, CY002457, CY002777, CY003049, CY006077, CY006085, CY006132, CY006140, CY006148,
CY006156, CY006292, CY002001, CY002241, CY002449, CY002721, CY003345, CY002017, CY002265,
CY002465, CY002489, CY002737, CY003649, CY003641, CY002481, CY003057, CY006124, CY007796,
CY008405, CY009029, CY007804, CY007812, CY008365, CY008373, CY009045, CY008557, CY008349,
CY008357, CY008605, CY008341, CY008381, CY008389, CY008397, CY008413, CY008421, CY008429,
CY008437, CY008445, CY008573, CY008581, CY008589, CY008597, CY008613, CY008621, CY008629,
CY008637, CY008645, CY009037, CY008565, CY008653, CY002065, CY002081, CY002177, CY002217,
CY002225, CY002233, CY002249, CY002281, CY002409, CY002417, CY002585, CY002601, CY002713,
CY002907, CY002915, CY002931, CY002939, CY002947, CY002955, CY002963, CY002970, CY002977,
CY003041, CY003665, CY006372, DQ249268, CY002425, CY002433, CY002505, CY002729, CY003033,
CY000034, CY000258, CY000370, CY000562, CY000762, CY000890, CY001030, CY001230, CY002025,
CY002041, CY002049, CY002209, CY002257, CY002289, CY002441, CY002473, CY002593, CY002609,
CY002769, CY002923, CY003409, CY003657, CY006180, CY002193, CY002785, CY006116, CY008517,
CY006380, CY008165, CY002761, CY002793, CY003073, CY003337, CY003417, CY007292, CY007388,
CY007508, CY006436, CY007300, CY007308, CY007380, CY007436, CY007444, CY007476, CY007492,
CY007556, CY006093, CY007276, CY007332, CY007348, CY007372, CY007404, CY007452, CY007460,
CY007484, CY007532, CY007548, CY007564, CY007580, CY008205, CY008213, CY009261, CY007364,
CY008221, CY007356, CY007644, CY009253, CY007284, CY007324, CY007412, CY007420, CY007428,
CY007524, CY007540, CY007572, CY008229, CY008245, CY008253, CY008909, CY007316, CY007340,
CY008189, CY009269, CY007500, CY008237, CY007396, CY007516, CY001633, CY003681, DQ098266,
DQ098267, CY000194, CY000002, CY000010, CY000018, CY000026, CY000042, CY000050, CY000058,
CY000066, CY000074, CY000082, CY000090, CY000098, CY000106, CY000122, CY000130, CY000138,
CY000146, CY000154, CY000162, CY000170, CY000178, CY000250, CY000266, CY000346, CY000354,
CY000362, CY000378, CY000474, CY000506, CY000514, CY000522, CY000754, CY000770, CY000778,
CY000786, CY000866, CY000874, CY000882, CY000902, CY000910, CY000950, CY000958, CY000966,
CY000974, CY001014, CY001022, CY001038, CY001046, CY001054, CY001062, CY001065, CY001089,
CY001097, CY001113, CY001161, CY001206, CY001214, CY001222, CY001254, CY001286, CY001294,
CY001374, CY001406, CY001462, CY001470, CY001513, CY001545, CY001553, CY001561, CY001625,
CY001641, CY001649, CY001713, CY002345, CY002521, CY002105, CY001537, DQ098269, DQ100422,
DQ100423, DQ100424, CY001342, CY001422, CY006972, CY006988, CY007036, CY007140, CY007268,
CY000918, CY006924, CY006932, CY006940, CY006956, CY006964, CY006980, CY006996, CY007004,
CY007012, CY007044, CY007052, CY007060, CY007076, CY007084, CY007092, CY007100, CY007116,
CY007124, CY007132, CY007188, CY006948, CY007020, CY007068, CY007108, CY007148, CY007156,
CY007164, CY007172, CY007180, CY007204, CY007220, CY007228, CY007236, CY007244, CY007252,
CY007260, CY008197, CY009245, CY006860, CY007196, CY008541, CY008549, CY008885, CY008893,
CY008901, CY008917, CY009021, CY008869, CY008877, CY007212, CY007028, CY000234, CY000242,
CY000546, CY000942, CY001334, CY003127, CY003145, CY003153, CY003201, CY003778, CY000538,
CY000554, CY000794, CY001198, CY003121, CY003177, CY003193, CY000114, CY000210, CY000218,
CY000226, CY000282, CY000290, CY000298, CY000314, CY000330, CY000338, CY000394, CY000402,
CY000410, CY000418, CY000426, CY000434, CY000442, CY000490, CY000498, CY000530, CY000626,
CY000926, CY000934, CY001073, CY001081, CY001105, CY001129, CY001145, CY001153, CY001185,
CY001238, CY001302, CY001310, CY001318, CY001326, CY001729, CY001737, CY001945, CY002129,
CY003097, CY003105, CY003161, CY003169, CY003185, CY003425, CY003209, CY001262, CY000586,
CY001438, CY003137, CY007652, CY007764, CY007780, CY001430, CY007588, CY007596, CY007604,
CY007668, CY007676, CY007684, CY007740, CY007748, CY007772, CY007788, CY003113, CY007660,
CY007692, CY007700, CY007708, CY007716, CY007724, CY007732, CY007756, CY008277, CY008301,
CY008269, CY008293, CY008333, CY008261, CY008285, CY008309, CY008317, CY008325, CY002817,
DQ249266, CY000186, CY000202, CY000274, CY000322, CY000386, CY000482, CY000570, CY000577,
CY001169, CY001721, CY002329, CY003081, CY003089, CY000306, CY001398, CY003249, CY003257,
CY003449, CY003457, CY003265, CY003273, CY000450, CY000466, CY000610, CY000658, CY000666,
CY000690, CY000698, CY000706, CY000714, CY000738, CY000810, CY000818, CY000834, CY000842,
CY000850, CY000982, CY000998, CY001246, CY001278, CY001366, CY003810, CY003826, CY003281,
CY006660, CY001137, CY003241, CY001521, CY008501, CY008509, CY009101, CY009149, CY003818,
CY008837, CY008477, CY009085, CY009117, CY009133, CY009141, CY009165, CY008485, CY008749,
CY008757, CY008773, CY008781, CY008789, CY008797, CY008805, CY008813, CY008821, CY008829,
CY008845, CY008853, CY008861, CY009077, CY009125, CY009157, CY008493, CY008765, AJ293925,
AF386765, AF386766, AF386767, AF386768, AF386770, AF386771, AF386772, CY001529, CY001617, CY001665,
CY001809, CY001873, CY001881, CY002297, CY002305, CY002337, CY003433, CY003569, CY003577,
CY003585, CY003609, CY003617, CY006061, CY006900, CY001897, CY001977, CY001985, CY002169,
CY003625, CY003786, CY000458, CY000594, CY000602, CY000618, CY000634, CY000642, CY000650,
CY000674, CY000682, CY000722, CY000730, CY000802, CY000826, CY000858, CY000990, CY001006,
CY001121, CY001177, CY001270, CY001358, CY001382, CY001446, CY001454, CY001577, CY001593,
CY001601, CY001657, CY001689, CY001697, CY001705, CY001745, CY001753, CY001761, CY001769,
CY001777, CY001793, CY001825, CY001841, CY001849, CY001857, CY001865, CY001889, CY001905,
CY001913, CY001921, CY001929, CY001937, CY001961, CY001969, CY001993, CY002113, CY002137,
CY002145, CY002369, CY002553, CY002561, CY002577, CY003593, CY003794, CY003217, CY006069,
CY003601, CY003633, CY000746, CY001414, CY001833, CY002161, CY002313, CY003225, CY003233,
CY003441, CY003802, CY001350, CY006164, CY007636, CY009109, CY001609, AF386769, AJ458305,
CY001801, CY001817, CY002121, CY001478, CY001486, CY001494, CY001569, CY001585, CY001673,
CY001785, CY002377, CY002545, CY002385, CY006252, CY003561, CY006540, CY006788, CY006532,
CY006284, CY006460, CY006572, CY006580, CY008181, CY006604, CY006772, CY006484, CY006492,
CY006500, CY006516, CY006548, CY006588, CY006596, CY006636, CY006796, CY006804, CY006556,
CY006564, CY006620, CY008533, CY008925, CY008941, CY008949, CY008957, CY008965, CY008973,
CY008981, CY006476, CY001505, AJ458307, AJ458308, AF255369, AF255370, CY006228, CY006244, CY006276,
CY006452, CY006236, CY006260, CY006468, CY006444, CY006508, CY006524, CY006612, CY006628,
CY008933, CY006268, AF038274, AJ458306, AF038271, AF038272, AF038273, AJ458339, CY002273, U65565,
U65568, U65569, U65570, U65572, U65573, U65574, U65575, U65576, U65577, U65578, CY006340, CY003753,
CY006332, U65563, U65564, U65566, U65567, U65571, CY006348, CY009013, U65561, U65562, CY003713,
CY003065, CY008741, L18995, L18999, AF401293, M63516, CY003513, CY003353, CY008725, CY008733,
CY003545, CY002089, CY002753, CY008717, CY003521, CY003537, CY003505, CY008453, CY009069,
CY008669, CY008709, CY006324, CY003745, CY008173, CY006316, CY006852, CY003721, CY003737,
CY009053, CY006053, U08863, CY006756, AF348912, AF348913, CY007628, CY003489, CY006100, CY006892,
CY007620, CY008469, CY006204, CY008661, K01140, CY006692, CY006700, CY006708, CY007612, CY006732,
CY006740, CY006844, CY006764, CY006724, CY006836, CY006884, CY009061, CY008693, CY008701,
CY006045, CY003729, CY006908, CY003497, CY006828, CY006716, CY006820, CY009005, CY006812,
CY003529, X08090, X08092, CY002097, CY003553, J02167, CY002745, CY006308, CY008461, CY008685,
CY008677, AY210266, AY210267, AY210268, AY210269, AY210270, CY002497, CY006220, AY210262,
AY210263, AY210264, AY210265, CY006684, AY210258, AY210259, AY210260, AY210261, CY006300,
AY210253, AY210254, AY210255, AY210256, AY210257, CY008157, M63515, AF348188, AF348191, AF348192,
AF348193, AF348195, AF348196, AF348197, CY006212, AF348189, AF348190, AF348194, AY210239, AY210240,
AY210241, AY210242, AY210243, AY210244, AY210245, AY210246, AY210247, AY210248, AY210249,
AY210250, AY210251, AY210252, DQ360841, DQ094271, DQ094272, DQ094273, DQ094274, DQ094275,
DQ372592, DQ094266, DQ094267, AY818144, AY651387, AY651388, AY651389, AY651390, AB212057,
AY575894, AY575893, AF255374, AJ278648, AF036358, AF255365, AF255366, AF255367, AF255368, AF255371,
AF255372, AF255373, AF046090, AF084282, AF084284, AF115286, DQ226095, AF255363, AF255364, AJ278647,
AJ278646

TABLE 1-8
GenBank accession numbers for NS sequences (segment 8) used in this analysis.

CY007471, CY002540, CY002628, CY002684, CY002692, CY002708, CY002812, CY002988, CY003300,
CY003380, CY003388, CY003692, CY003708, CY006199, CY006431, CY006671, CY006919, CY008528,
CY009000, CY002532, CY003308, CY006679, DQ249269, CY001956, CY002396, CY002404, CY002572,
CY002620, CY002676, CY002700, CY002804, CY003004, CY003012, CY003020, CY003028, CY003292,
CY003316, CY003324, CY003332, CY003396, CY003404, CY003468, CY003476, CY003484, CY003837,
CY006175, CY006359, CY006367, CY006423, CY006783, CY006879, CY008152, CY009240, CY002644,
CY002652, CY009176, CY009184, CY009192, CY009200, CY009208, CY009224, CY009232, AF258521,
AF342817, AF258520, AF055423, AF055424, AF055425, AF398877, U53170, U53171, AF055422, CY009320,
M57643, M80974, M12593, M12594, AJ298950, X15282, M12595, CY009288, CY009296, K00578, CY008992,
M12592, CY009368, CY009344, X52146, CY009336, K00576, K00577, U02087, M12596, U13682, AF389122,
L25720, M12597, U13683, Z21498, AF333238, CY002156, CY002356, CY002364, CY002636, CY002660,
CY002668, CY002996, CY003676, CY003700, CY003765, CY006111, CY006191, CY006391, CY006399,
CY006407, CY006415, CY006751, CY006871, AB126628, AB126636, AJ519455, CY001684, CY003372,
CY003773, AY210191, AY210192, M12590, AY210182, AY210183, AY210184, AY210185, AY210186, AY210187,
AY210188, AY210189, AY210190, AY210178, AY210179, AY210180, AY210181, AY210174, AY210175,
AY210176, AY210177, AY210171, AY210172, AY210173, AY210168, AY210169, AY210170, AY210164,
AY210165, AY210166, AY210167, AY210162, AY210163, AY210160, AY210161, M23968, AY210158, AY210159,
AY210156, AY210157, AY210151, AY210152, AY210153, AY210154, AY210155, M81572, M81578, M81584,
CY002004, CY002012, CY002020, CY002036, CY002060, CY002076, CY002188, CY002204, CY002244,
CY002268, CY002452, CY002460, CY002468, CY002484, CY002492, CY002724, CY002740, CY002780,
CY003052, CY003060, CY003348, CY003644, CY003652, CY006080, CY006088, CY006127, CY006135,
CY006143, CY006151, CY006159, CY006295, CY007799, CY007807, CY007815, CY008344, CY008352,
CY008360, CY008368, CY008376, CY008384, CY008392, CY008400, CY008408, CY008416, CY008424,
CY008432, CY008440, CY008448, CY008560, CY008568, CY008576, CY008584, CY008592, CY008600,
CY008608, CY008616, CY008624, CY008632, CY008640, CY008648, CY008656, CY009032, CY009040,
CY009048, CY000037, CY000261, CY000373, CY000565, CY000765, CY000893, CY001033, CY001233,
CY002028, CY002044, CY002052, CY002068, CY002084, CY002180, CY002196, CY002212, CY002220,
CY002228, CY002236, CY002252, CY002260, CY002284, CY002292, CY002412, CY002420, CY002428,
CY002436, CY002444, CY002476, CY002508, CY002588, CY002596, CY002604, CY002612, CY002716,
CY002732, CY002764, CY002772, CY002788, CY002796, CY002910, CY002918, CY002926, CY002934,
CY002942, CY002950, CY002958, CY002966, CY002973, CY002980, CY003036, CY003044, CY003076,
CY003340, CY003412, CY003420, CY003660, CY003668, CY006096, CY006119, CY006183, CY006375,
CY006383, CY006439, CY007279, CY007287, CY007295, CY007303, CY007311, CY007319, CY007327,
CY007335, CY007343, CY007351, CY007359, CY007367, CY007375, CY007383, CY007391, CY007399,
CY007407, CY007415, CY007423, CY007431, CY007439, CY007447, CY007455, CY007463, CY007479,
CY007487, CY007495, CY007503, CY007511, CY007519, CY007527, CY007535, CY007543, CY007551,
CY007559, CY007567, CY007575, CY007583, CY007647, CY008168, CY008192, CY008208, CY008216,
CY008224, CY008232, CY008240, CY008248, CY008256, CY008520, CY008912, CY009256, CY009264,
CY009272, CY000005, CY000013, CY000021, CY000029, CY000045, CY000053, CY000061, CY000069,
CY000077, CY000085, CY000093, CY000101, CY000109, CY000125, CY000133, CY000141, CY000149,
CY000157, CY000165, CY000173, CY000181, CY000197, CY000253, CY000269, CY000349, CY000357,
CY000365, CY000381, CY000477, CY000509, CY000516, CY000525, CY000757, CY000773, CY000781,
CY000789, CY000869, CY000877, CY000885, CY000905, CY000913, CY000921, CY000953, CY000961,
CY000969, CY000977, CY001017, CY001025, CY001041, CY001049, CY001057, CY001068, CY001092,
CY001100, CY001116, CY001164, CY001193, CY001209, CY001217, CY001225, CY001257, CY001289,
CY001297, CY001345, CY001377, CY001409, CY001425, CY001465, CY001473, CY001516, CY001540,
CY001548, CY001556, CY001564, CY001628, CY001636, CY001644, CY001652, CY001716, CY002108,
CY002348, CY002524, CY003684, CY006863, CY006927, CY006935, CY006943, CY006951, CY006959,
CY006967, CY006975, CY006983, CY006991, CY006999, CY007007, CY007015, CY007023, CY007031,
CY007039, CY007047, CY007055, CY007063, CY007071, CY007079, CY007087, CY007095, CY007103,
CY007111, CY007119, CY007127, CY007135, CY007143, CY007151, CY007159, CY007167, CY007175,
CY007183, CY007191, CY007199, CY007207, CY007215, CY007223, CY007231, CY007239, CY007247,
CY007255, CY007263, CY007271, CY008200, CY008544, CY008552, CY008872, CY008880, CY008888,
CY008896, CY008904, CY008920, CY009024, CY009248, CY000117, CY000213, CY000221, CY000229,
CY000237, CY000245, CY000285, CY000293, CY000301, CY000317, CY000333, CY000341, CY000397,
CY000405, CY000413, CY000421, CY000429, CY000437, CY000445, CY000493, CY000501, CY000533,
CY000541, CY000549, CY000557, CY000589, CY000629, CY000797, CY000929, CY000937, CY000945,
CY001076, CY001084, CY001108, CY001132, CY001148, CY001156, CY001188, CY001201, CY001241,
CY001265, CY001305, CY001313, CY001321, CY001329, CY001337, CY001433, CY001441, CY001732,
CY001740, CY001948, CY002132, CY003100, CY003108, CY003116, CY003125, CY003131, CY003140,
CY003148, CY003156, CY003164, CY003172, CY003180, CY003188, CY003196, CY003204, CY003212,
CY003428, CY003781, CY007591, CY007599, CY007607, CY007655, CY007663, CY007671, CY007679,
CY007687, CY007695, CY007703, CY007711, CY007719, CY007727, CY007735, CY007743, CY007751,
CY007759, CY007767, CY007775, CY007783, CY007791, CY008264, CY008272, CY008280, CY008288,
CY008296, CY008304, CY008312, CY008320, CY008328, CY008336, DQ249270, CY000189, CY000205,
CY000277, CY000309, CY000325, CY000389, CY000485, CY000573, CY000580, CY001172, CY001724,
CY002332, CY002820, CY003084, CY003092, CY000453, CY000469, CY000613, CY000661, CY000669,
CY000693, CY000701, CY000709, CY000717, CY000741, CY000813, CY000821, CY000837, CY000845,
CY000853, CY000985, CY001001, CY001140, CY001249, CY001281, CY001369, CY001401, CY001524,
CY003244, CY003252, CY003260, CY003268, CY003276, CY003284, CY003452, CY003460, CY003813,
CY003821, CY003829, CY006663, CY008480, CY008488, CY008496, CY008504, CY008512, CY008752,
CY008760, CY008768, CY008776, CY008784, CY008792, CY008800, CY008808, CY008816, CY008824,
CY008832, CY008840, CY008848, CY008856, CY008864, CY009080, CY009088, CY009104, CY009120,
CY009128, CY009136, CY009144, CY009152, CY009160, CY009168, AJ293941, CY000461, CY000597,
CY000605, CY000621, CY000637, CY000645, CY000653, CY000677, CY000685, CY000725, CY000733,
CY000749, CY000805, CY000829, CY000861, CY000993, CY001009, CY001124, CY001180, CY001273,
CY001353, CY001361, CY001385, CY001417, CY001449, CY001457, CY001532, CY001580, CY001596,
CY001604, CY001612, CY001620, CY001660, CY001668, CY001692, CY001700, CY001708, CY001748,
CY001756, CY001764, CY001772, CY001780, CY001796, CY001812, CY001828, CY001836, CY001844,
CY001852, CY001860, CY001868, CY001876, CY001884, CY001892, CY001900, CY001908, CY001916,
CY001924, CY001932, CY001940, CY001964, CY001972, CY001980, CY001988, CY001996, CY002116,
CY002140, CY002148, CY002164, CY002172, CY002300, CY002308, CY002316, CY002340, CY002372,
CY002516, CY002556, CY002564, CY002580, CY003220, CY003228, CY003236, CY003436, CY003444,
CY003572, CY003580, CY003588, CY003596, CY003604, CY003612, CY003620, CY003628, CY003636,
CY003789, CY003797, CY003805, CY006064, CY006072, CY006167, CY006903, CY007639, CY009112,
CY001481, CY001489, CY001497, CY001508, CY001572, CY001588, CY001676, CY001788, CY001804,
CY001820, CY002124, CY002380, CY002388, CY002548, CY003564, CY006255, CY006287, CY006463,
CY006479, CY006487, CY006495, CY006503, CY006519, CY006535, CY006543, CY006551, CY006559,
CY006567, CY006575, CY006583, CY006591, CY006599, CY006607, CY006623, CY006639, CY006775,
CY006791, CY006799, CY006807, CY008184, CY008536, CY008928, CY008944, CY008952, CY008960,
CY008968, CY008976, CY008984, AF038279, AF256182, AF256183, CY006231, CY006239, CY006247,
CY006263, CY006271, CY006279, CY006447, CY006455, CY006471, CY006511, CY006527, CY006615,
CY006631, CY008936, AF038276, AF038277, AF038278, AF038275, CY002276, U65671, U65672, U65673,
U65674, CY003756, CY006335, CY006343, U65670, CY006351, CY009016, D30675, D30676, CY003716, D30667,
D30674, D30673, CY003068, CY008744, D30670, D30672, CY003356, CY003516, CY008728, CY008736, M57642,
CY003548, D30671, M57641, M80975, CY002092, CY002756, CY008720, M57640, CY003508, CY003524,
CY003540, CY008456, CY008672, CY008712, CY009072, M17699, CY003748, CY006327, CY008176, CY003724,
CY003740, CY006319, CY006855, CY009056, CY006056, CY006759, U08862, CY007631, CY003492, CY006103,
CY006207, CY006895, CY007623, CY008472, CY008664, CY006695, CY006703, CY006711, CY007615,
CY006735, CY006743, CY006767, CY006847, K01332, CY006727, CY006839, CY006887, CY008696, CY008704,
CY009064, CY003732, CY006048, CY003500, CY006719, CY006823, CY006831, CY006911, CY003532,
CY006815, CY009008, AY210312, AY210313, AY210314, AY210315, AY210316, CY002100, CY002748,
CY003556, CY006311, CY008464, CY008680, CY008688, V01102, AY210307, AY210309, AY210310, AY210311,
CY002500, CY006223, CY006687, AY210304, AY210305, AY210306, AY210308, AY210299, AY210300,
AY210301, AY210302, AY210303, CY006303, AF348198, AF348199, AF348200, AF348201, AF348202, AF348203,
AF348204, AF348205, AF348206, AY210285, AY210286, AY210287, AY210288, AY210289, AY210290,
AY210291, AY210292, AY210293, AY210294, AY210295, AY210296, AY210297, AY210298, CY006215,
CY008160, DQ360842, DQ372595, AY526747, AY651552, AY651553, AY651554, AY651555, AY818147,
AB212058, AB212059, AY576368, AY576369, AF256188, AF036360, AF046091, AF084285, AF084286, AF084287,
AF115288, AF256178, AF256179, AF256180, AF256181, AF256184, AF256185, AF256186, AF256187, AJ404736,
DQ226117, AF256177, AJ278649, AJ404735, AY043027

[0174] Highly conserved 19-mer sequence fragments were identified by extracting all 19-mer sequence fragments from each of the influenza A viral sequences under study, and then tabulating whether or not each sequence fragment is present, as an exact match, within each of the influenza A viral sequences. Thus, a first viral sequence contains a 19-mer sequence fragment that extends from position 1 through 19, another from position 2 through 20, another from position 3 through 21, etc. Likewise the second, third, and fourth viral sequences are extracted in the same way, all the way down to the last viral sequence in the list (Table 1).

[0175] The sequence fragments are then added to a growing table of sequence fragments and a count is maintained of the number of influenza A viral sequences that contain each 19-mer fragment. Finally, the fragment frequency is expressed as the percent of the influenza A viral sequences that contain each specific 19-mer fragment. Table 2 lists the most conserved 19-mer sequence fragments (down to 70%) and their frequency of occurrence.

TABLE 2-1

Conserved 19-mer sequences that are present in
at least 70% of the Influenza A segment 1 (PB2)
sequences listed in Table 1-1.

| | | |
|---|---|---|
| Seq | | |
| ID | Sequence | Percent |

| | | |
|---|---|---|
| 1 | GCCAGACAGCGACCAAAAG | 99.5% |
| 2 | AGCCAGACAGCGACCAAAA | 99.5% |
| 3 | ACAGCCAGACAGCGACCAA | 99.3% |
| 4 | GACAGCCAGACAGCGACCA | 99.3% |
| 5 | CAGACAGCGACCAAAAGAA | 99.3% |
| 6 | CAGCCAGACAGCGACCAAA | 99.3% |
| 7 | AGACAGCGACCAAAAGAAU | 99.1% |
| 8 | CCAGACAGCGACCAAAAGA | 99.1% |
| 9 | ACAGCGACCAAAAGAAUUC | 99.1% |
| 10 | UACUUACUGACAGCCAGAC | 99.1% |
| 11 | CAGCGACCAAAAGAAUUCG | 99.1% |
| 12 | ACUUACUGACAGCCAGACA | 99.1% |
| 13 | CAUACUUACUGACAGCCAG | 99.1% |
| 14 | CUUACUGACAGCCAGACAG | 99.1% |
| 15 | GACAGCGACCAAAAGAAUU | 99.1% |
| 16 | AUACUUACUGACAGCCAGA | 99.1% |
| 17 | ACUGACAGCCAGACAGCGA | 99.0% |
| 18 | GCAUACUUACUGACAGCCA | 99.0% |
| 19 | AGCAUACUUACUGACAGCC | 99.0% |
| 20 | UGACAGCCAGACAGCGACC | 99.0% |
| 21 | UACUGACAGCCAGACAGCG | 99.0% |
| 22 | UUACUGACAGCCAGACAGC | 99.0% |
| 23 | CUGACAGCCAGACAGCGAC | 99.0% |
| 24 | ACUCUAGCAUACUUACUGA | 98.9% |
| 25 | UAGCAUACUUACUGACAGC | 98.7% |
| 26 | CUCUAGCAUACUUACUGAC | 98.6% |
| 27 | CUAGCAUACUUACUGACAG | 98.6% |
| 28 | UCUAGCAUACUUACUGACA | 98.6% |
| 29 | CAAAAGAAUUCGGAUGGCC | 98.6% |
| 30 | AAAAGAAUUCGGAUGGCCA | 98.6% |
| 31 | GACCAAAAGAAUUCGGAUG | 98.5% |
| 32 | CGACCAAAAGAAUUCGGAU | 98.5% |
| 33 | AAAGAAUUCGGAUGGCCAU | 98.5% |
| 34 | AGCGACCAAAAGAAUUCGG | 98.5% |
| 35 | GCGACCAAAAGAAUUCGGA | 98.5% |
| 36 | CCAAAAGAAUUCGGAUGGC | 98.5% |
| 37 | ACCAAAAGAAUUCGGAUGG | 98.5% |
| 38 | GAAUUCGGAUGGCCAUCAA | 98.4% |
| 39 | UUCGGAUGGCCAUCAAUUA | 98.3% |
| 40 | AUUCGGAUGGCCAUCAAUU | 98.3% |
| 41 | GACUCUAGCAUACUUACUG | 98.3% |
| 42 | AGAAUUCGGAUGGCCAUCA | 98.3% |
| 43 | AAGAAUUCGGAUGGCCAUC | 98.3% |
| 44 | AAUUCGGAUGGCCAUCAAU | 98.3% |
| 45 | GGGACUCUAGCAUACUUAC | 98.1% |
| 46 | ACGGGACUCUAGCAUACUU | 98.0% |
| 47 | AAACGGGACUCUAGCAUAC | 98.0% |
| 48 | CGGGACUCUAGCAUACUUA | 98.0% |
| 49 | AACGGGACUCUAGCAUACU | 98.0% |
| 50 | GGACUCUAGCAUACUUACU | 97.9% |
| 51 | AUGAAACGAAAACGGGACU | 95.9% |
| 52 | GAAAUGGAUGAUGGCAAUG | 95.8% |
| 53 | UGGAUGAUGGCAAUGAAAU | 95.8% |
| 54 | UGAAAUGGAUGAUGGCAAU | 95.8% |
| 55 | GGAUGAUGGCAAUGAAAUA | 95.8% |
| 56 | UGAAACGAAAACGGGACUC | 95.8% |
| 57 | AAAUGGAUGAUGGCAAUGA | 95.8% |
| 58 | AUGGAUGAUGGCAAUGAAA | 95.7% |
| 59 | AAUGGAUGAUGGCAAUGAA | 95.7% |
| 60 | AUGAAAUGGAUGAUGGCAA | 95.7% |
| 61 | GAAACGAAAACGGGACUCU | 95.5% |
| 62 | AAACGAAAACGGGACUCUA | 95.5% |
| 63 | AACGAAAACGGGACUCUAG | 95.4% |
| 64 | GAAAACGGGACUCUAGCAU | 95.4% |
| 65 | ACGAAAACGGGACUCUAGC | 95.4% |
| 66 | CGAAAACGGGACUCUAGCA | 95.4% |
| 67 | AAAACGGGACUCUAGCAUA | 95.3% |
| 68 | GAAAGGUUAAAACAUGGAA | 94.9% |
| 69 | AAAGGUUAAAACAUGGAAC | 94.9% |
| 70 | AAGGUUAAAACAUGGAACC | 94.8% |
| 71 | GGUUAAAACAUGGAACCUU | 94.8% |
| 72 | AGGUUAAAACAUGGAACCU | 94.8% |
| 73 | CUCGCACUCGCGAGAUACU | 94.5% |
| 74 | UCUCGCACUCGCGAGAUAC | 94.5% |
| 75 | UAAAAGCAGUUAGAGGUGA | 94.3% |
| 76 | UCGGAUGGCCAUCAAUUAA | 94.2% |
| 77 | AGGAUGAAAUGGAUGAUGG | 94.0% |
| 78 | GGAUGAAAUGGAUGAUGGC | 94.0% |
| 79 | UUAGGAUGAAAUGGAUGAU | 93.9% |
| 80 | AUGGUUGCAUACAUGUUAG | 93.9% |
| 81 | UAGGAUGAAAUGGAUGAUG | 93.9% |
| 82 | UGGUUGCAUACAUGUUAGA | 93.9% |
| 83 | CUUAGGAUGAAAUGGAUGA | 93.9% |
| 84 | UUGCAUACAUGUUAGAGAG | 93.9% |
| 85 | ACUUAGGAUGAAAUGGAUG | 93.9% |
| 86 | GUUGCAUACAUGUUAGAGA | 93.8% |
| 87 | UAAAACAUGGAACCUUUGG | 93.8% |
| 88 | UUAAAACAUGGAACCUUUG | 93.8% |
| 89 | GGUUGCAUACAUGUUAGAG | 93.8% |
| 90 | UGAUGGUUGCAUACAUGUU | 93.7% |
| 91 | AUGAGAAUACUUGUAAGGG | 93.7% |
| 92 | UGAGAAUACUUGUAAGGGG | 93.7% |
| 93 | CACUUAGGAUGAAAUGGAU | 93.7% |
| 94 | GUUAAAACAUGGAACCUUU | 93.7% |
| 95 | UUGAUGGUUGCAUACAUGU | 93.5% |
| 96 | GAUGGUUGCAUACAUGUUA | 93.4% |
| 97 | UCACUUAGGAUGAAAUGGA | 93.3% |
| 98 | AACAUGGAACCUUUGGCCC | 93.1% |
| 99 | AAACAUGGAACCUUUGGCC | 93.1% |
| 100 | CAAGCUGUGGAUAUAUGCA | 92.9% |
| 101 | AAGCUGUGGAUAUAUGCAA | 92.9% |
| 102 | AAAACAUGGAACCUUUGGC | 92.8% |
| 103 | GUAAUGAAACGAAAACGGG | 92.6% |
| 104 | UAAUGAAACGAAAACGGGA | 92.6% |
| 105 | AAUGAAACGAAAACGGGAC | 92.6% |
| 106 | GAUGAAAUGGAUGAUGGCA | 92.3% |
| 107 | AACAAGCUGUGGAUAUAUG | 91.3% |
| 108 | GAACAAGCUGUGGAUAUAU | 91.3% |
| 109 | ACAAGCUGUGGAUAUAUGC | 91.2% |
| 110 | UGUACACUCCAGGUGGAGA | 90.0% |
| 111 | AUGUACACUCCAGGUGGAG | 90.0% |
| 112 | AGAACAAGCUGUGGAUAUA | 89.8% |
| 113 | GAAGAACAAGCUGUGGAUA | 89.8% |
| 114 | AAGAACAAGCUGUGGAUAU | 89.8% |
| 115 | UGAUAAAAGCAGUUAGAGG | 89.7% |
| 116 | AUGAUAAAAGCAGUUAGAG | 89.6% |
| 117 | ACAUGGUGGAAUAGAAAUG | 89.3% |
| 118 | CAUGGUGGAAUAGAAAUGG | 89.3% |
| 119 | CGGAUGGCCAUCAAUUAAU | 89.1% |
| 120 | GAUAAAAGCAGUUAGAGGU | 88.9% |
| 121 | AUAAAAGCAGUUAGAGGUG | 88.9% |
| 122 | AUAUGGCCAUAAUUAAGAA | 88.8% |
| 123 | CAUAUGGCCAUAAUUAAGA | 88.8% |
| 124 | UGGAAAGAAUAAAAGAACU | 88.5% |
| 125 | UGGUGGAAUAGAAAUGGAC | 88.5% |
| 126 | AUGGAAAGAAUAAAAGAAC | 88.5% |
| 127 | GGUGGAAUAGAAAUGGACC | 88.4% |
| 128 | GGAAAGAAUAAAAGAACUA | 88.4% |
| 129 | AUGGUGGAAUAGAAAUGGA | 88.4% |
| 130 | AUGGCCAUAAUUAAGAAGU | 88.1% |
| 131 | UGGCCAUAAUUAAGAAGUA | 88.1% |
| 132 | AGUCUCGCACUCGCGAGAU | 88.1% |
| 133 | GUCUCGCACUCGCGAGAUA | 88.1% |
| 134 | UAUUCAACUACAACAAGAC | 88.1% |
| 135 | CAGUCUCGCACUCGCGAGA | 88.1% |
| 136 | UAUGGCCAUAAUUAAGAAG | 88.0% |
| 137 | GACCAUAUGGCCAUAAUUA | 87.8% |
| 138 | UGGACCAUAUGGCCAUAAU | 87.7% |
| 139 | GUAUUCAACUACAACAAGA | 87.7% |
| 140 | GUGGACCAUAUGGCCAUAA | 87.7% |
| 141 | CAUGUUAGAGAGAGAACUU | 87.6% |
| 142 | UACAUGUUAGAGAGAGAAC | 87.6% |
| 143 | ACAUGUUAGAGAGAGAACU | 87.6% |
| 144 | ACCAUAUGGCCAUAAUUAA | 87.6% |
| 145 | UGUUAGAGAGAGAACUUGU | 87.6% |
| 146 | AUGUUAGAGAGAGAACUUG | 87.6% |
| 147 | ACACUCCAGGUGGAGAAGU | 87.4% |
| 148 | AUGUCGCAGUCUCGCACUC | 87.4% |
| 149 | GUACACUCCAGGUGGAGAA | 87.4% |
| 150 | UACACUCCAGGUGGAGAAG | 87.4% |
| 151 | UGUCGCAGUCUCGCACUCG | 87.4% |
| 152 | UCGCAGUCUCGCACUCGCG | 87.3% |
| 153 | GUCGCAGUCUCGCACUCGC | 87.3% |
| 154 | GCAGUCUCGCACUCGCGAG | 87.2% |
| 155 | CGCAGUCUCGCACUCGCGA | 87.2% |
| 156 | CACUCCAGGUGGAGAAGUG | 87.2% |
| 157 | ACUCCAGGUGGAGAAGUGA | 87.1% |
| 158 | GAUUGCAUGAUAAAAGCAG | 87.0% |
| 159 | CCAGGUGGAGAAGUGAGGA | 87.0% |
| 160 | CAUACAUGUUAGAGAGAGA | 87.0% |
| 161 | GCAUGAUAAAAGCAGUUAG | 87.0% |
| 162 | AUUGCAUGAUAAAAGCAGU | 87.0% |
| 163 | GCAUACAUGUUAGAGAGAG | 87.0% |
| 164 | CUCCAGGUGGAGAAGUGAG | 87.0% |
| 165 | CAUGAUAAAAGCAGUUAGA | 87.0% |
| 166 | GUGGAGAAGUGAGGAAUGA | 86.9% |
| 167 | UGCAUGAUAAAAGCAGUUA | 86.9% |
| 168 | CAGGUGGAGAAGUGAGGAA | 86.9% |
| 169 | GGUGGAGAAGUGAGGAAUG | 86.9% |
| 170 | UUGCAUGAUAAAAGCAGUU | 86.8% |
| 171 | AGGUGGAGAAGUGAGGAAU | 86.8% |
| 172 | UGCAUACAUGUUAGAGAGA | 86.7% |
| 173 | AAAGAAUAAAAGAACUACG | 86.6% |
| 174 | GAGAUGUGCCACAGCACAC | 86.6% |
| 175 | UAAGAGUCAGCAAAAUGGG | 86.6% |
| 176 | CCAUAUGGCCAUAAUUAAG | 86.5% |
| 177 | GAUUUCUCCCAGUUGCUGG | 86.5% |
| 178 | AGAUUUCUCCCAGUUGCUG | 86.5% |
| 179 | AGGAGGUCAGUGAAACACA | 86.4% |
| 180 | GAGGAGGUCAGUGAAACAC | 86.4% |
| 181 | GAAAGAAUAAAAGAACUAC | 86.4% |
| 182 | AUACAUGUUAGAGAGAGAA | 86.2% |
| 183 | AGGGAUGAGAAUACUUGUA | 86.1% |
| 184 | UAUGCAAGGCUGCAAUGGG | 86.1% |
| 185 | GGAUGAGAAUACUUGUAAG | 86.1% |
| 186 | GCACAGAGAUGUCAAUGAG | 86.1% |
| 187 | GAAAAGAACCCGUCACUUA | 86.1% |
| 188 | AGCACAGAGAUGUCAAUGA | 86.1% |
| 189 | AUAUGCAAGGCUGCAAUGG | 86.1% |
| 190 | GGGAUGAGAAUACUUGUAA | 86.1% |
| 191 | AAAAGAACCCGUCACUUAG | 86.1% |
| 192 | UCAGGGAUGAGAAUACUUG | 86.1% |
| 193 | CAGGGAUGAGAAUACUUGU | 86.1% |
| 194 | CCAAGCACAGAGAUGUCAA | 86.0% |
| 195 | CAGGAAAAGAACCCGUCAC | 86.0% |
| 196 | CCACAGUGGACCAUAUGGC | 86.0% |
| 197 | AGGAAAAGAACCCGUCACU | 86.0% |
| 198 | ACCACAGUGGACCAUAUGG | 86.0% |
| 199 | CAGUGGACCAUAUGGCCAU | 86.0% |
| 200 | GAAUACUUGUAAGGGGCAA | 86.0% |
| 201 | AGAUGUGCCACAGCACACA | 86.0% |
| 202 | GGAAAAGAACCCGUCACUU | 86.0% |
| 203 | AAGCACAGAGAUGUCAAUG | 86.0% |
| 204 | AGAAUACUUGUAAGGGGCA | 86.0% |
| 205 | GGACCAUAUGGCCAUAAUU | 86.0% |
| 206 | ACAGUGGACCAUAUGGCCA | 86.0% |
| 207 | AGUGGACCAUAUGGCCAUA | 86.0% |
| 208 | CAAGCACAGAGAUGUCAAU | 86.0% |
| 209 | GAGAAUACUUGUAAGGGGC | 86.0% |
| 210 | GACAGGAAAAGAACCCGUC | 85.9% |
| 211 | AUCGAGUGAUGGUAUCACC | 85.9% |
| 212 | GCUGUGGAUAUAUGCAAGG | 85.9% |
| 213 | GGAUAUAUGCAAGGCUGCA | 85.9% |
| 214 | UGGAUAUAUGCAAGGCUGC | 85.9% |
| 215 | AGACAGGAAAAGAACCCGU | 85.9% |
| 216 | ACAAAAACCACAGUGGACC | 85.9% |
| 217 | UUUGCAGCCGCUCCACCAA | 85.9% |
| 218 | CUGUGGAUAUAUGCAAGGC | 85.9% |
| 219 | GUGGAUAUAUGCAAGGCUG | 85.9% |
| 220 | ACAGGAAAAGAACCCGUCA | 85.9% |
| 221 | CAGAGAUGUCAAUGAGAGG | 85.9% |
| 222 | GAUCGAGUGAUGGUAUCAC | 85.9% |
| 223 | UAUAUGCAAGGCUGCAAUG | 85.9% |
| 224 | AUAUAUGCAAGGCUGCAAU | 85.9% |
| 225 | UCCAGGUGGAGAAGUGAGG | 85.9% |
| 226 | CAAAAACCACAGUGGACCA | 85.9% |
| 227 | UUGCAGCCGCUCCACCAAA | 85.9% |
| 228 | UACUCAGAAAAGCAACCAG | 85.8% |
| 229 | AUAAUUAAGAAGUACACAU | 85.8% |
| 230 | AAAAACCACAGUGGACCAU | 85.8% |
| 231 | AUACUCAGAAAAGCAACCA | 85.8% |
| 232 | GAUAUAUGCAAGGCUGCAA | 85.8% |
| 233 | AAAACCACAGUGGACCAUA | 85.8% |
| 234 | AAGAAUAAAAGAACUACGG | 85.8% |
| 235 | UACAACAAAAUGGAAUUUG | 85.8% |
| 236 | ACAACAAAAUGGAAUUUGA | 85.8% |
| 237 | AAACCACAGUGGACCAUAU | 85.8% |
| 238 | CACAGUGGACCAUAUGGCC | 85.8% |
| 239 | CACAGAGAUGUCAAUGAGA | 85.8% |
| 240 | UAAUUAAGAAGUACACAUC | 85.8% |
| 241 | ACAGAGAUGUCAAUGAGAG | 85.8% |
| 242 | AACCACAGUGGACCAUAUG | 85.8% |
| 243 | AUCAGGGAUGAGAAUACUU | 85.7% |
| 244 | AGAAUAAAAGAACUACGGA | 85.7% |
| 245 | AUACUUGUAAGGGGCAAUU | 85.7% |
| 246 | GAUCAGGGAUGAGAAUACU | 85.7% |
| 247 | AGCUGUGGAUAUAUGCAAG | 85.7% |
| 248 | CCAUAAUUAAGAAGUACAC | 85.7% |
| 249 | UGUGGAUAUAUGCAAGGCU | 85.7% |
| 250 | UACUUGUAAGGGGCAAUUC | 85.7% |
| 251 | AAUACUUGUAAGGGGCAAU | 85.7% |
| 252 | GGAUCAGGGAUGAGAAUAC | 85.7% |
| 253 | CAUAAUUAAGAAGUACACA | 85.7% |
| 254 | ACCCGUCACUUAGGAUGAA | 85.6% |
| 255 | CCGUCACUUAGGAUGAAAU | 85.6% |
| 256 | GUCACUUAGGAUGAAAUGG | 85.6% |
| 257 | GCCAUAAUUAAGAAGUACA | 85.6% |
| 258 | CGUCACUUAGGAUGAAAUG | 85.6% |
| 259 | CCCGUCACUUAGGAUGAAA | 85.6% |
| 260 | GGCCAUAAUUAAGAAGUAC | 85.6% |
| 261 | AACCCGUCACUUAGGAUGA | 85.6% |
| 262 | UGGUAAUGAAACGAAAACG | 85.4% |
| 263 | UUGGUAAUGAAACGAAAAC | 85.4% |
| 264 | AGGGGAUCAGGGAUGAGAA | 85.3% |
| 265 | AGGUCAGUGAAACACAGGG | 85.3% |
| 266 | GGGGAUCAGGGAUGAGAAU | 85.3% |
| 267 | GAGGUCAGUGAAACACAGG | 85.3% |
| 268 | UUGUAAGGGGCAAUUCUCC | 85.3% |
| 269 | GGGAGACAGGAAAAGAACC | 85.3% |
| 270 | GGAGACAGGAAAAGAACCC | 85.3% |
| 271 | GGGAUCAGGGAUGAGAAUA | 85.3% |
| 272 | CUUGUAAGGGGCAAUUCUC | 85.3% |
| 273 | ACUUGUAAGGGGCAAUUCU | 85.3% |
| 274 | AGAAUCAGCUCAUCCUUCA | 85.1% |
| 275 | GGUAAUGAAACGAAAACGG | 85.1% |
| 276 | UGAGGGGAUCAGGGAUGAG | 85.1% |
| 277 | GUGAGGGGAUCAGGGAUGA | 85.1% |
| 278 | AUGUGAGGGGAUCAGGGAU | 85.1% |
| 279 | GAGGGGAUCAGGGAUGAGA | 85.1% |
| 280 | ACCACCCAGAUAAUAAAGC | 85.1% |
| 281 | AAUGUGAGGGGAUCAGGGA | 85.1% |
| 282 | CCACCCAGAUAAUAAAGCU | 85.1% |
| 283 | UGUGAGGGGAUCAGGGAUG | 85.1% |
| 284 | GCUAUACUCAGAAAAGCAA | 85.0% |
| 285 | CUAUACUCAGAAAAGCAAC | 85.0% |
| 286 | GAAUCAGCUCAUCCUUCAG | 85.0% |
| 287 | CCUGAGGAGGUCAGUGAAA | 84.9% |
| 288 | CUGAGGAGGUCAGUGAAAC | 84.9% |
| 289 | UAUACDCAGAAAAGCAACC | 84.9% |
| 290 | CAACAGCUAUACUCAGAAA | 84.8% |
| 291 | AUGGAACCUUUGGCCCUGU | 84.8% |
| 292 | GCAACAGCUAUACUCAGAA | 84.8% |
| 293 | AUAAGAGUCAGCAAAAUGG | 84.8% |
| 294 | UGAGGAGGUCAGUGAAACA | 84.6% |
| 295 | UUUUAAGGCAUUUUCAGAA | 84.6% |
| 296 | CUCUAUUCCAACAAAUGAG | 84.6% |
| 297 | ACUCUAUUCCAACAAAUGA | 84.6% |
| 298 | GAACCCGUCACUUAGGAUG | 84.6% |
| 299 | AAGAACCCGUCACUUAGGA | 84.6% |
| 300 | AGAACCCGUCACUCAGGAU | 84.6% |
| 301 | AACAGCUAUACUCAGAAAA | 84.6% |
| 302 | AGAUAAUAAAGCUUCUCCC | 84.5% |
| 303 | CCCAGAUAAUAAAGCUUCU | 84.5% |
| 304 | CAGAUAAUAAAGCUUCUCC | 84.5% |
| 305 | CUUUUAAGGCAUUUUCAGA | 84.5% |
| 306 | GUAAUUAUGGAAGUUGUUU | 84.4% |
| 307 | ACCCAGAUAAUAAAGCUUC | 84.4% |
| 308 | AUGUAAUUAUGGAAGUUGU | 84.4% |
| 309 | CCUGGUCAUGCAGACCUCA | 84.4% |
| 310 | GAUGUAAUUAUGGAAGUUG | 84.4% |
| 311 | UCCUGAGGAGGUCAGUGAA | 84.4% |
| 312 | CUCCUGAGGAGGUCAGUGA | 84.4% |
| 313 | UAAUUAUGGAAGUUGUUUU | 84.4% |
| 314 | CACCCAGAUAAUAAAGCUU | 84.4% |
| 315 | UGGAGAUGUGCCACAGCAC | 84.4% |
| 316 | UCUCCUGAGGAGGUCAGUG | 84.4% |
| 317 | ACAGCUAUACUCAGAAAAG | 84.4% |
| 318 | CCACUAGCAUCUUUAUUGG | 84.4% |
| 319 | CACUAGCAUCUUUAUUGGA | 84.4% |
| 320 | CUGGUCAUGCAGACCUCAG | 84.3% |
| 321 | CAUGGAACCUUUGGCCCUG | 84.3% |
| 322 | UGUAAUUAUGGAAGUUGUU | 84.3% |
| 323 | CAGCUAUACUCAGAAAAGC | 84.2% |
| 324 | AUUCUCCUGUAUUCAACUA | 84.2% |
| 325 | AAAGAACCCGUCACUUAGG | 84.2% |
| 326 | UUGGAGAUGUGCCACAGCA | 84.2% |
| 327 | AAUUCUCCUGUAUUCAACU | 84.2% |
| 328 | ACAUGGAACCDUUGGCCCU | 84.1% |
| 329 | GGAGAUGUGCCACAGCACA | 84.1% |
| 330 | UCAGAUCGAGUGAUGGUAU | 84.1% |
| 331 | UAUUGGAGAUGUGCCACAG | 84.1% |
| 332 | AGAUCGAGUGAUGGUAUCA | 84.1% |
| 333 | CAGAUCGAGUGAUGGUAUC | 84.1% |
| 334 | CCAGAUAAUAAAGCUUCUC | 84.1% |
| 335 | AUUGGAGAUGUGCCACAGC | 84.1% |
| 336 | AGCUAUACUCAGAAAAGCA | 84.0% |
| 337 | GGCAAUUCUCCUGUAUUCA | 84.0% |
| 338 | CUUUAUUGGAGAUGUGCCA | 84.0% |
| 339 | UUAUUGGAGAUGUGCCACA | 84.0% |
| 340 | UCCAAGCACAGAGAUGUCA | 84.0% |
| 341 | UCUUUAUUGGAGAUGUGCC | 84.0% |
| 342 | GCAAUUCUCCUGUAUUCAA | 83.9% |
| 343 | CUCCAAGCACAGAGAUGUC | 83.9% |
| 344 | GCCAUGGUGUUUUCACAAG | 83.9% |
| 345 | GAGACAGGAAAAGAACCCG | 83.9% |
| 346 | UUUAUUGGAGAUGUGCCAC | 83.9% |
| 347 | CAUCUUUAUUGGAGAUGUG | 83.9% |
| 348 | CCAUGGUGUUUUCACAAGA | 83.9% |
| 349 | GGAGGUCAGUGAAACACAG | 83.9% |
| 350 | AAAAUUCAAUGGUCUCAGA | 83.9% |
| 351 | AAAUUCAAUGGUCUCAGAA | 83.8% |
| 352 | AGCAUCUUUAUUGGAGAUG | 83.8% |
| 353 | AUGACUCCAAGCACAGAGA | 83.8% |
| 354 | CUAGCAUCUUUAUUGGAGA | 83.8% |
| 355 | GCAUCUUUAUUGGAGAUGU | 83.8% |
| 356 | GACAUAAACCCUGGUCAUG | 83.8% |
| 357 | UAUCUCCUGAGGAGGUCAG | 83.8% |
| 358 | CAAUUCUCCUGUAUUCAAC | 83.8% |
| 359 | GAUGAGAAUACUUGUAAGG | 83.8% |
| 360 | UAGCAUCUUUAUUGGAGAU | 83.8% |
| 361 | AUCUUUAUUGGAGAUGUGC | 83.7% |
| 362 | UGACUCCAAGCACAGAGAU | 83.7% |
| 363 | AUCUCCUGAGGAGGUCAGU | 83.7% |
| 364 | ACAUAAACCCUGGUCAUGC | 83.7% |
| 365 | GAGAAUCAGCUCAUCCUUC | 83.7% |
| 366 | UGAGAAUCAGCUCAUCCUU | 83.7% |
| 367 | GACUCCAAGCACAGAGAUG | 83.7% |
| 368 | ACUAGCAUCUUUAUUGGAG | 83.7% |
| 369 | ACUCCAAGCACAGAGAUGU | 83.7% |
| 370 | AAGGAACGUGUUGGGAACA | 83.6% |
| 371 | CAAGGAACGUGUUGGGAAC | 83.6% |
| 372 | GGCAAUCUCCAAACAUUGA | 83.6% |
| 373 | CAGCCGCUCCACCAAAGCA | 83.5% |
| 374 | GCAGCCGCUCCACCAAAGC | 83.5% |
| 375 | GGCAUUUUCAGAAAGAUGC | 83.4% |
| 376 | AGGCAUUUUCAGAAAGAUG | 83.4% |
| 377 | UAAGGCAUUUUCAGAAAGA | 83.4% |
| 378 | ACUUUAAUUGAAGACCCAG | 83.4% |
| 379 | AAGGCAUUUUCAGAAAGAU | 83.4% |
| 380 | UUAAGGCAUUUUCAGAAAG | 83.4% |
| 381 | GCAAUCUCCAAACAUUGAA | 83.4% |
| 382 | GCACUUUAAUUGAAGACCC | 83.3% |
| 383 | CACUUUAAUUGAAGACCCA | 83.3% |
| 384 | CUUUAAUUGAAGACCCAGA | 83.3% |
| 385 | GGCACUUUAAUUGAAGACC | 83.3% |
| 386 | UUUAAGGCAUUUUCAGAAA | 83.2% |
| 387 | UUUAAUUGAAGACCCAGAU | 83.2% |
| 388 | UUUGAGAGUUCGAGACCAA | 83.2% |
| 389 | UUU0UGAGAGUUCGAGACC | 83.2% |
| 390 | GCCGCUCCACCAAAGCAAA | 83.2% |
| 391 | UUUUGAGAGUUCGAGACCA | 83.2% |
| 392 | AGCCGCUCCACCAAAGCAA | 83.2% |
| 393 | UUAAUUGAAGACCCAGAUG | 83.2% |
| 394 | UGCAGCCGCUCCACCAAAG | 83.2% |
| 395 | CCGCUCCACCAAAGCAAAG | 83.2% |
| 396 | UAAUUGAAGACCCAGAUGA | 83.0% |
| 397 | UUGAGAGUUCGAGACCAAC | 83.0% |
| 398 | UUCACAAUGGUGGGGAAAA | 83.0% |
| 399 | UAAACCCUGGUCAUGCAGA | 82.9% |
| 400 | UUCAAUGGUCUCAGAAUCC | 82.9% |
| 401 | UCACAAUGGUGGGGAAAAG | 82.9% |
| 402 | UCAAUGGUCUCAGAAUCCU | 82.9% |
| 403 | UCGAGUGAUGGUAUCACCU | 82.9% |
| 404 | AUUCAAUGGUCUCAGAAUC | 82.9% |
| 405 | AAUUCAAUGGUCUCAGAAU | 82.9% |
| 406 | UCAGUGAAACACAGGGAAC | 82.8% |
| 407 | AUAAACCCUGGUCAUGCAG | 82.8% |
| 408 | ACCCUGGUCAUGCAGACCU | 82.8% |
| 409 | AAACCCUGGUCAUGCAGAC | 82.8% |
| 410 | AACCCUGGUCAUGCAGACC | 82.8% |
| 411 | GUCAGUGAAACACAGGGAA | 82.7% |
| 412 | GAGGAUUGCAUGAUAAAAG | 82.7% |
| 413 | GUAAGGGGCAAUUCUCCUG | 82.7% |
| 414 | AGGAUUGCAUGAUAAAAGC | 82.7% |
| 415 | UGUAAGGGGCAAUUCUCCU | 82.7% |
| 416 | CAUAAACCCUGGUCAUGCA | 82.7% |
| 417 | UGAGAGUUCGAGACCAACG | 82.6% |
| 418 | CAAGAGGAUUGCAUGAUAA | 82.6% |
| 419 | AAGAGGAUUGCAUGAUAAA | 82.6% |
| 420 | UCACAAGAGGAUUGCAUGA | 82.5% |
| 421 | UAAGGGGCAAUUCUCCUGU | 82.5% |
| 422 | GGAUUGCAUGAUAAAAGCA | 82.5% |
| 423 | CACAAGAGGAUUGCAUGAU | 82.5% |
| 424 | AGAGGAUUGCAUGAUAAAA | 82.5% |
| 425 | ACAAGAGGAUUGCAUGAUA | 82.5% |
| 426 | GUGUUUUCACAAGAGGAUU | 82.4% |
| 427 | UGUUUUCACAAGAGGAUUG | 82.4% |
| 428 | AAGAAGUGCUUACAGGCAA | 82.3% |
| 429 | UUCACAAGAGGAUUGCAUG | 82.3% |
| 430 | UUUCACAAGAGGAUUGCAU | 82.3% |
| 431 | GUUUUCACAAGAGGAUUGC | 82.3% |
| 432 | GAAGAAGUGCUUACAGGCA | 82.3% |
| 433 | UUUUCACAAGAGGAUUGCA | 82.3% |
| 434 | GCCAAUACAGUGGGUUUGU | 82.2% |
| 435 | AGGGGCAAUUCUCCUGUAU | 82.1% |
| 436 | UUAGAGGUGACCUGAAUUU | 82.1% |
| 437 | UGGAAUUUGAACCAUUUCA | 82.1% |
| 438 | GGGGCAAUUCUCCUGUAUU | 82.1% |
| 439 | AAGGGGCAAUUCUCCUGUA | 82.1% |
| 440 | AUGGAAUUUGAACCAUUUC | 82.1% |
| 441 | GUUAGAGGUGACCUGAAUU | 82.1% |
| 442 | AAAAUGGAAUUUGAACCAU | 82.0% |
| 443 | UGUACAACAAAAUGGAAUU | 82.0% |
| 444 | AAAUGGAAUUUGAACCAUU | 82.0% |
| 445 | GUACAACAAAAUGGAAUUU | 82.0% |
| 446 | CAGUUAGAGGUGACCUGAA | 81.9% |
| 447 | GAGGUGACCUGAAUUUCGU | 81.8% |
| 448 | AGAGGUGACCUGAAUUUCG | 81.8% |
| 449 | UAGAGGUGACCUGAAUUUC | 81.8% |
| 450 | AAAGCAGUUAGAGGUGACC | 81.8% |
| 451 | AAGCAGUUAGAGGUGACCU | 81.8% |
| 452 | AAAAGCAGUUAGAGGUGAC | 81.8% |
| 453 | AGUUAGAGGUGACCUGAAU | 81.8% |
| 454 | GCAGUUAGAGGUGACCUGA | 81.8% |
| 455 | AGCAGUUAGAGGUGACCUG | 81.8% |
| 456 | AAUGGAAUUUGAACCAUUU | 81.7% |
| 457 | GGAGAAGUGAGGAAUGACG | 81.7% |
| 458 | GGGCAAUUCUCCUGUAUUC | 81.7% |
| 459 | GAGAAGUGAGGAAUGACGA | 81.7% |
| 460 | UGGAGAAGUGAGGAAUGAC | 81.6% |
| 461 | UUGUACAACAAAAUGGAAU | 81.4% |
| 462 | UGUUGUACAACAAAAUGGA | 81.4% |
| 463 | AGCAUUAAGCAUCAAUGAA | 81.4% |
| 464 | CAGCAUUAAGCAUCAAUGA | 81.4% |
| 465 | CCAGCAUUAAGCAUCAAUG | 81.4% |
| 466 | AUGUUGUACAACAAAAUGG | 81.3% |
| 467 | GGAGUAAAAUGAGUGAUGC | 81.3% |
| 468 | AAUUGAAGACCCAGAUGAA | 81.3% |
| 469 | UGGAGUAAAAUGAGUGAUG | 81.3% |
| 470 | UUCAACUACAACAAGACCA | 81.2% |
| 471 | UCAACUACAACAAGACCAC | 81.2% |
| 472 | GUUGUACAACAAAAUGGAA | 81.2% |
| 473 | AUGGUGUUUUCACAAGAGG | 81.0% |
| 474 | AUGGAGUAAAAUGAGUGAU | 81.0% |
| 475 | CUAUGGAGUAAAAUGAGUG | 81.0% |
| 476 | UGGUGUUUUCACAAGAGGA | 81.0% |
| 477 | UAUGGAGUAAAAUGAGUGA | 81.0% |
| 478 | AGAAGUGAGGAAUGACGAU | 80.9% |
| 479 | CAAUGUUGUACAACAAAAU | 80.8% |
| 480 | AUUCAACUACAACAAGACC | 80.8% |
| 481 | CAUGGUGUUUUCACAAGAG | 80.8% |
| 482 | AAUGUUGUACAACAAAAUG | 80.8% |
| 483 | GGUGUUUUCACAAGAGGAU | 80.8% |
| 484 | ACAAGGAUGGUGGACAUUC | 80.6% |
| 485 | CAAGGAUGGUGGACAUUCU | 80.6% |
| 486 | AACUACAACAAGACCACUA | 80.6% |
| 487 | ACUACAACAAGACCACUAA | 80.6% |
| 488 | GCAGAUCCACUAGCAUCUU | 80.5% |
| 489 | CAGAUCCACUAGCAUCUUU | 80.5% |
| 490 | GUGAUGGUAUCACCUUUGG | 80.4% |
| 491 | UGAUGGUAUCACCUUUGGC | 80.4% |
| 492 | AGAUACGGACCAGCAUUAA | 80.4% |
| 493 | GAGUGAUGGUAUCACCUUU | 80.4% |
| 494 | AUCCACUAGCAUCUUUAUU | 80.3% |
| 495 | GAUACGGACCAGCAUUAAG | 80.3% |
| 496 | AGAUCCACUAGCAUCUUUA | 80.3% |
| 497 | GAUCCACUAGCAUCUUUAU | 80.3% |
| 498 | CGAGUGAUGGUAUCACCUU | 80.3% |
| 499 | CAACUACAACAAGACCACU | 80.3% |
| 500 | UUACAGGCAAUCUCCAAAC | 80.2% |
| 501 | ACAGGCAAUCUCCAAACAU | 80.2% |
| 502 | CUUACAGGCAAUCUCCAAA | 80.2% |
| 503 | UACAGGCAAUCUCCAAACA | 80.2% |
| 504 | CAGGCAAUCUCCAAACAUU | 80.2% |
| 505 | AGUGAUGGUAUCACCUUUG | 80.2% |
| 506 | AGGCAAUCUCCAAACAUUG | 79.9% |
| 507 | UAUGGAAAGAAUAAAAGAA | 79.9% |
| 508 | AAGAUACGGACCAGCAUUA | 79.9% |
| 509 | AUGCGAAAGUGCUUUUUCA | 79.7% |
| 510 | UAUCAAUGGAUCAUCAGAA | 79.7% |
| 511 | GGAUGGUGGACAUUCUUAG | 79.7% |
| 512 | ACCUAUCAAUGGAUCAUCA | 79.6% |
| 513 | GCUUACAGGCAAUCUCCAA | 79.6% |
| 514 | AAGGAUGGUGGACAUUCUU | 79.6% |
| 515 | AGGAUGGUGGACAUUCUUA | 79.6% |
| 516 | GAAGUGCUUACAGGCAAUC | 79.6% |
| 517 | AUCAAUGGAUCAUCAGAAA | 79.6% |
| 518 | UGCUUACAGGCAAUCUCCA | 79.6% |
| 519 | AAGUGCUUACAGGCAAUCU | 79.6% |
| 520 | GAAGUGAGGAAUGACGAUG | 79.5% |
| 521 | GUGCUUACAGGCAAUCUCC | 79.5% |
| 522 | AAGUGAGGAAUGACGAUGU | 79.5% |
| 523 | AGAGACUGACAAUAACUUA | 79.5% |
| 524 | GAGAGACUGAGAAUAACUU | 79.5% |
| 525 | AGAAGUGCUUACAGGCAAU | 79.5% |
| 526 | GAAGAUACGGACCAGCAUU | 79.5% |
| 527 | GAUGCGAAAGUGCUUUUUC | 79.5% |
| 528 | UCAGCUCAUCCUUCAGCUU | 79.5% |
| 529 | AUGUGCCACAGCACACAAA | 79.4% |
| 530 | AAUACCUAUCAAUGGAUCA | 79.4% |
| 531 | CCUAUCAAUGGAUCAUCAG | 79.4% |
| 532 | AUACCUAUCAAUGGAUCAU | 79.4% |
| 533 | UGUGCCACAGCACACAAAU | 79.4% |
| 534 | AGAAGAUACGGACCAGCAU | 79.4% |
| 535 | AGUGCUUACAGGCAAUCUC | 79.4% |
| 536 | AUCAGCUCAUCCUUCAGCU | 79.4% |
| 537 | AGGAGUUCACAAUGGUGGG | 79.4% |
| 538 | GAGGAGUUCACAAUGGUGG | 79.4% |
| 539 | AAUCAGCUCAUCCUUCAGC | 79.3% |
| 540 | GAUGUGCCACAGCACACAA | 79.3% |
| 541 | AGCUCAUCCUUCAGCUUUG | 79.2% |
| 542 | CUGUAUUCAACUACAACAA | 79.2% |
| 543 | GCUCAUCCUUCAGCUUUGG | 79.2% |
| 544 | UCAAUGAGAGGAAUAAGAG | 79.2% |
| 545 | UGAGAGGAAUAAGAGUCAG | 79.2% |
| 546 | CAAUGAGAGGAAUAAGAGU | 79.2% |
| 547 | GUGCCACAGCACACAAAUU | 79.2% |
| 548 | GAGGAAUAAGAGUCAGCAA | 79.2% |
| 549 | CCUGUAUUCAACUACAACA | 79.2% |
| 550 | CAGCUCAUCCUUCAGCUUU | 79.2% |
| 551 | AAUGAGAGGAAUAAGAGUC | 79.1% |
| 552 | UGUAUUCAACUACAACAAG | 79.1% |
| 553 | AGAGGAAUAAGAGUCAGCA | 79.1% |
| 554 | CUAUCAAUGGAUCAUCAGA | 79.1% |
| 555 | GGUCAAUACCUAUCAAUGG | 79.1% |
| 556 | GAGUCAGCAAAAUGGGUGU | 79.1% |
| 557 | AUGAGAGGAAUAAGAGUCA | 79.1% |
| 558 | UGGUCAAUACCUAUCAAUG | 79.1% |
| 559 | UCUCCUGUAUUCAACUACA | 79.1% |
| 560 | AGAGUCAGCAAAAUGGGUG | 79.1% |
| 561 | GCCACAGCACACAAAUUGG | 79.1% |
| 562 | CUCCUGUAUUCAACUACAA | 79.1% |
| 563 | GUCAAUGAGAGGAAUAAGA | 79.1% |
| 564 | AGAGAUGUCAAUGAGAGGA | 79.1% |
| 565 | UGUCAAUGAGAGGAAUAAG | 79.1% |
| 566 | GGAUGGCCAUCAAUUAAUG | 79.1% |
| 567 | GAGAGGAAUAAGAGUCAGC | 79.1% |
| 568 | UGCCACAGCACACAAAUUG | 79.1% |
| 569 | GGAAUAAGAGUCAGCAAAA | 79.0% |
| 570 | UACCUAUCAAUGGAUCAUC | 79.0% |
| 571 | UUGGCGGGACAAGGAUGGU | 79.0% |
| 572 | AUUGGCGGGACAAGGAUGG | 79.0% |
| 573 | UCAAUACCUAUCAAUGGAU | 78.9% |
| 574 | AUGCAGACCUCAGUGCCAA | 78.9% |
| 575 | CAAGGACAAACUCUAUGGA | 78.9% |
| 576 | AAGGACAAACUCUAUGGAG | 78.9% |
| 577 | AGGAAUAAGAGUCAGCAAA | 78.9% |
| 578 | GAGUUCACAAUGGUGGGGA | 78.9% |
| 579 | AAUAAGAGUCAGCAAAAUG | 78.9% |
| 580 | AGUUCACAAUGGUGGGGAA | 78.9% |
| 581 | GAAUAAGAGUCAGCAAAAU | 78.9% |
| 582 | AUGUCAAUGAGAGGAAUAA | 78.9% |
| 583 | UUGGUCAAUACCUAUCAAU | 78.9% |
| 584 | GUUCACAAUGGUGGGGAAA | 78.9% |
| 585 | UCCUGUAUUCAACUACAAC | 78.9% |
| 586 | UUCUCCUGUAUUCAACUAC | 78.8% |
| 587 | CAUGCAGACCUCAGUGCCA | 78.8% |
| 588 | UGAGGAAUGACGAUGUUGA | 78.7% |
| 589 | GAUGGCCAUCAAUUAAUGU | 78.7% |
| 590 | GUGAGGAAUGACGAUGUUG | 78.7% |
| 591 | GUCAAUACCUAUCAAUGGA | 78.7% |
| 592 | AGUGAGGAAUGACGAUGUU | 78.7% |
| 593 | GGAGUUCACAAUGGUGGGG | 78.6% |
| 594 | CCACAGCACACAAAUUGGC | 78.5% |
| 595 | AGAACUCUAUUCCAACAAA | 78.5% |
| 596 | GAUGUCAAUGAGAGGAAUA | 78.5% |
| 597 | GAACUCUAUUCCAACAAAU | 78.5% |
| 598 | GGUCAGUGAAACACAGGGA | 78.5% |
| 599 | AGAUGUCAAUGAGAGGAAU | 78.5% |
| 600 | GAGAUGUCAAUGAGAGGAA | 78.5% |
| 601 | AACUCUAUUCCAACAAAUG | 78.5% |
| 602 | GGGACAAGGAUGGUGGACA | 78.4% |
| 603 | CAAACUCUAUGGAGUAAAA | 78.4% |
| 604 | GGACAAGGAUGGUGGACAU | 78.4% |
| 605 | ACAGCACACAAAUUGGCGG | 78.4% |
| 606 | CACAGCACACAAAUUGGCG | 78.4% |
| 607 | CAAUACCUAUCAAUGGAUC | 78.3% |
| 608 | GACAAGGAUGGUGGACAUU | 78.3% |
| 609 | AAACUCUAUGGAGUAAAAU | 78.3% |
| 610 | CAAAAUGGAAUUUGAACCA | 78.1% |
| 611 | UGUUGGGAACAAAUGUACA | 78.1% |
| 612 | AACAAAAUGGAAUUUGAAC | 78.1% |
| 613 | AACUCUAUGGAGUAAAAUG | 78.1% |
| 614 | ACAAAAUGGAAUUUGAACC | 78.1% |
| 615 | CACACAAAUUGGCGGGACA | 78.1% |
| 616 | GUUGGGAACAAAUGUACAC | 78.1% |
| 617 | GCACACAAAUUGGCGGGAC | 78.0% |
| 618 | CAGAAAGAUGCGAAAGUGC | 78.0% |
| 619 | AGCACACAAAUUGGCGGGA | 78.0% |
| 620 | AAAGAUGCGAAAGUGCUUU | 78.0% |
| 621 | AGAAAGAUGCGAAAGUGCU | 78.0% |
| 622 | AAGAUGCGAAAGUGCUUUU | 78.0% |
| 623 | GCGGGACAAGGAUGGUGGA | 78.0% |
| 624 | ACACAAAUUGGCGGGACAA | 78.0% |
| 625 | UGAUGUCGCAGUCUCGCAC | 77.9% |
| 626 | CAACAAAAUGGAAUUUGAA | 77.9% |
| 627 | GGAACAAAUGUACACUCCA | 77.8% |
| 628 | CAAAUGUACACUCCAGGUG | 77.8% |
| 629 | CUGAUGUCGCAGUCUCGCA | 77.8% |
| 630 | CGGGACAAGGAUGGUGGAC | 77.8% |
| 631 | GGGAACAAAUGUACACUCC | 77.8% |
| 632 | UUGGGAACAAAUGUACACU | 77.8% |
| 633 | GAACAAAUGUACACUCCAG | 77.8% |
| 634 | AAAUGUACACUCCAGGUGG | 77.8% |
| 635 | GAAAGAUGCGAAAGUGCUU | 77.8% |
| 636 | UGGGAACAAAUGUACACUC | 77.8% |
| 637 | ACAAAUGUACACUCCAGGU | 77.8% |
| 638 | GAGUAGACAUAAACCCUGG | 77.8% |
| 639 | AACAAAUGUACACUCCAGG | 77.8% |
| 640 | AGAGUAGACAUAAACCCUG | 77.8% |
| 641 | AUUUUAGAAAUCAAGUCAA | 77.7% |
| 642 | AAGAGUAGACAUAAACCCU | 77.7% |
| 643 | CAUUUUAGAAAUCAAGUCA | 77.7% |
| 644 | GAAGAGUAGACAUAAACCC | 77.7% |
| 645 | UGAAGACCCAGAUGAAAGC | 77.7% |
| 646 | GGCGGGACAAGGAUGGUGG | 77.7% |
| 647 | AAGACCCAGAUGAAAGCAC | 77.7% |
| 648 | AAUGUACACUCCAGGUGGA | 77.6% |
| 649 | GAUGUCGCAGUCUCGCACU | 77.6% |
| 650 | UGGCGGGACAAGGAUGGUG | 77.6% |
| 651 | GAAGACCCAGAUGAAAGCA | 77.6% |
| 652 | CAUUUUCAGAAAGAUGCGA | 77.5% |
| 653 | UUUUCAGAAAGAUGCGAAA | 77.5% |
| 654 | AUUUUCAGAAAGAUGCGAA | 77.5% |
| 655 | AGACCACUAAAAGACUAAC | 77.4% |
| 656 | UUUCAGAAAGAUGCGAAAG | 77.4% |
| 657 | AAGACCACUAAAAGACUAA | 77.4% |
| 658 | AUUGAAGACCCAGAUGAAA | 77.4% |
| 659 | AACAAGACCACUAAAAGAC | 77.4% |
| 660 | ACAAGACCACUAAAAGACU | 77.4% |
| 661 | CAGCACACAAAUUGGCGGG | 77.4% |
| 662 | AGACCCAGAUGAAAGCACA | 77.4% |
| 663 | GACCACUAAAAGACUAACA | 77.4% |
| 664 | UUCAGAAAGAUGCGAAAGU | 77.4% |
| 665 | GUAGACAUAAACCCUGGUC | 77.3% |
| 666 | ACCCAGAUGAAAGCACAUC | 77.3% |
| 667 | UAGACAUAAACCCUGGUCA | 77.3% |
| 668 | CAAGACCACUAAAAGACUA | 77.2% |
| 669 | UGGUCAUGCAGACCUCAGU | 77.2% |
| 670 | GGUCAUGCAGACCUCAGUG | 77.2% |
| 671 | UCAGAAAGAUGCGAAAGUG | 77.2% |
| 672 | GCACAUCCGGAGUGGAGUC | 77.2% |
| 673 | GUCAUGCAGACCUCAGUGC | 77.2% |
| 674 | GACCCAGAUGAAAGCACAU | 77.2% |
| 675 | GUGUUGGGAACAAAUGUAC | 77.1% |
| 676 | AGCAGUAUAUACAUUGAAG | 77.1% |
| 677 | GUGGUGGUUAGCAUUGAUC | 77.1% |
| 678 | AGCUUCUCCCUUUUGCAGC | 77.1% |
| 679 | UGGUGGUUAGCAUUGAUCG | 77.1% |
| 680 | GGAUACUAACAUCAGAAUC | 77.1% |
| 681 | CGUGUUGGGAACAAAUGUA | 77.1% |
| 682 | AAGCUUCUCCCUUUUGCAG | 77.1% |
| 683 | GCAGUAUAUACAUUGAAGU | 77.1% |
| 684 | ACGUGUUGGGAACAAAUGU | 77.1% |
| 685 | AAGCAGUAUAUACAUUGAA | 77.0% |
| 686 | AGGAUACUAACAUCAGAAU | 77.0% |
| 687 | GCAUUUUCAGAAAGAUGCG | 77.0% |
| 688 | ACAAGCAGUAUAUACAUUG | 77.0% |
| 689 | UCAUGCAGACCUCAGUGCC | 77.0% |
| 690 | CAAGCAGUAUAUACAUUGA | 77.0% |
| 691 | AGACAUAAACCCUGGUCAU | 77.0% |
| 692 | AAUAAAGCUUCUCCCUUUU | 76.9% |
| 693 | UAAAGCUUCUCCCUUUUGC | 76.9% |
| 694 | AUAAUAAAGCUUCUCCCUU | 76.9% |
| 695 | UAAUAAAGCUUCUCCCUUU | 76.9% |
| 696 | CACAAAUUGGCGGGACAAG | 76.9% |
| 697 | GAUAAUAAAGCUUCUCCCU | 76.9% |
| 698 | AAAGCUUCUCCCUUUUGCA | 76.9% |
| 699 | AUAAAGCUUCUCCCUUUUG | 76.9% |
| 700 | GAACCAUUUCAAUCUUUAG | 76.8% |
| 701 | AGUAGACAUAAACCCUGGU | 76.8% |
| 702 | CUCAUCCUUCAGCUUUGGU | 76.8% |
| 703 | UCAUCCUUCAGCUUUUGUG | 76.8% |
| 704 | UGAACCAUUUCAAUCUUUA | 76.8% |
| 705 | AACCAUUUCAAUCUUUAGU | 76.8% |
| 706 | UUUGAACCAUUUCAAUCUU | 76.8% |
| 707 | UUGAACCAUUUCAAUCUUU | 76.8% |
| 708 | UUCUCCCUUUUGCAGCCGC | 76.8% |
| 709 | CAUCCUUCAGCUUUGGUGG | 76.8% |
| 710 | CUUCUCCCUUUUGCAGCCG | 76.8% |
| 711 | GUAUAUACAUUGAAGUUUU | 76.7% |
| 712 | GGAACAAGCAGUAUAUACA | 76.7% |
| 713 | GAAUUUGAACCAUUUCAAU | 76.7% |
| 714 | UCUCCCUUUUGCAGCCGCU | 76.7% |
| 715 | CUCCCUUUUGCAGCCGCUC | 76.7% |
| 716 | UCCCUUUUGCAGCCGCUCC | 76.7% |
| 717 | GGAAUUUGAACCAUUUCAA | 76.7% |
| 718 | AGUAUAUACAUUGAAGUUU | 76.7% |
| 719 | AUUUGAACCAUUUCAAUCU | 76.7% |
| 720 | AAUUUGAACCAUUUCAAUC | 76.7% |
| 721 | GAACAAGCAGUAUAUACAU | 76.7% |
| 722 | GCUUCUCCCUUUUGCAGCC | 76.7% |
| 723 | AACAAGCAGUAUAUACAUU | 76.5% |
| 724 | CCUUUUGCAGCCGCUCCAC | 76.4% |
| 725 | ACAAACUCUAUGGAGUAAA | 76.4% |
| 726 | GGACAAACUCUAUGGAGUA | 76.4% |
| 727 | GACAAACUCUAUGGAGUAA | 76.4% |
| 728 | CAGGAUACUAACAUCAGAA | 76.4% |
| 729 | AGGACAAACUCUAUGGAGU | 76.4% |
| 730 | AACGUGUUGGGAACAAAUG | 76.4% |
| 731 | GCCAGGAUACUAACAUCAG | 76.4% |
| 732 | AGGAACGUGUUGGGAACAA | 76.4% |
| 733 | GAACGUGUUGGGAACAAAU | 76.4% |
| 734 | CCAGGAUACUAACAUCAGA | 76.4% |
| 735 | CUUUUGCAGCCGCUCCACC | 76.4% |
| 736 | CAGUAUAUACAUUGAAGUU | 76.4% |
| 737 | GGAACGUGUUGGGAACAAA | 76.4% |
| 738 | UUUUGCAGCCGCUCCACCA | 76.4% |
| 739 | AGAUGCGAAAGUGCUUUUU | 76.3% |
| 740 | GGCCAUUAGAGGCCAAUAC | 76.2% |
| 741 | AGGCCAUUAGAGGCCAAUA | 76.2% |
| 742 | CCCUUUUGCAGCCGCUCCA | 76.2% |
| 743 | UUAGAGGCCAAUACAGUGG | 76.2% |
| 744 | AAGGCCAUUAGAGGCCAAU | 76.1% |
| 745 | CCAUUAGAGGCCAAUACAG | 76.1% |
| 746 | AUUAGAGGCCAAUACAGUG | 76.1% |
| 747 | GCCAUUAGAGGCCAAUACA | 76.1% |
| 748 | UCAGCAGAUCCACUAGCAU | 75.9% |
| 749 | GUAUCAGCAGAUCCACUAG | 75.9% |
| 750 | CAAAAUUCAAUGGUCUCAG | 75.9% |
| 751 | UAUCAGCAGAUCCACUAGC | 75.9% |
| 752 | CAGCAGAUCCACUAGCAUC | 75.9% |
| 753 | CAUUAGAGGCCAAUACAGU | 75.9% |
| 754 | GUCAAAAUUCAAUGGUCUC | 75.8% |
| 755 | UCAAAAUUCAAUGGUCUCA | 75.8% |
| 756 | GGAUCAUCAGAAAUUGGGA | 75.8% |
| 757 | UGGAUCAUCAGAAAUUGGG | 75.8% |
| 758 | GAUCAUCAGAAAUUGGGAA | 75.7% |
| 759 | AGCAGAUCCACUAGCAUCU | 75.7% |
| 760 | UUGAAGACCCAGAUGAAAG | 75.6% |
| 761 | ACUCUAUGGAGUAAAAUGA | 75.6% |
| 762 | AGGAAGACAGAAGAUACGG | 75.6% |
| 763 | AUCAGCAGAUCCACUAGCA | 75.6% |
| 764 | UGUCAAAAUUCAAUGGUCU | 75.6% |
| 765 | AAGGAAGACAGAAGAUACG | 75.6% |
| 766 | CAAUGGAUCAUCAGAAAUU | 75.5% |
| 767 | CCCUGGUCAUGCAGACCUC | 75.5% |
| 768 | AAUGGAUCAUCAGAAAUUG | 75.5% |
| 769 | AUGGAUCAUCAGAAAUUGG | 75.5% |
| 770 | AAAGCAGAAUGCAGUUCUC | 75.4% |
| 771 | UUUGUCAGAACUCUAUUCC | 75.4% |
| 772 | UUGUCAGAACUCUAUUCCA | 75.4% |
| 773 | CAAAGCAGAAUGCAGUUCU | 75.4% |
| 774 | UCAAUGGAUCAUCAGAAAU | 75.3% |
| 775 | CUCCACCAAAGCAAAGCAG | 75.3% |
| 776 | GCUCCACCAAAGCAAAGCA | 75.3% |
| 777 | UAAGCAUCAAUGAACUGAG | 75.3% |
| 778 | UCUAUGGAGUAAAAUGAGU | 75.3% |
| 779 | UCAGAACUCUAUUCCAACA | 75.2% |
| 780 | GAGCCAGGAUACUAACAUC | 75.2% |
| 781 | GCAGAAUGCAGUUCUCUUC | 75.2% |
| 782 | GAGAGGGUGGUGGUUAGCA | 75.2% |
| 783 | GGAGCCAGGAUACUAACAU | 75.2% |
| 784 | CUGUCAAAAUUCAAUGGUC | 75.2% |
| 785 | CAUUAAGCAUCAAUGAACU | 75.2% |
| 786 | AGCAGAAUGCAGUUCUCUU | 75.2% |
| 787 | AGAGGGUGGUGGUUAGCAU | 75.2% |
| 788 | AAGCAGAAUGCAGUUCUCU | 75.2% |
| 789 | CUCUAUGGAGUAAAAUGAG | 75.2% |
| 790 | CGCUCCACCAAAGCAAAGC | 75.2% |
| 791 | GUCAGAACUCUAUUCCAAC | 75.2% |
| 792 | GCAUUAAGCAUCAAUGAAC | 75.2% |
| 793 | AGCACAUCCGGAGUGGAGU | 75.2% |
| 794 | CAGAGAGGGUGGUGGUUAG | 75.1% |
| 795 | UGGGAGCCAGGAUACUAAC | 75.1% |
| 796 | ACAGAGAGGGUGGUGGUUA | 75.1% |
| 797 | AGAGAGGGUGGUGGUUAGC | 75.1% |
| 798 | GUGGGAGCCAGGAUACUAA | 75.1% |
| 799 | UGUCAGAACUCUAUUCCAA | 75.1% |
| 800 | GAAGAACUCCGAGAUUGCA | 74.9% |
| 801 | GGGAGCCAGGAUACUAACA | 74.8% |
| 802 | AACUCCGAGAUUGCAAAAU | 74.8% |
| 803 | AAGAACUCCGAGAUUGCAA | 74.8% |
| 804 | GAGAUUGCAAAAUUUCUCC | 74.7% |
| 805 | GGGUGGUGGUUAGCAUUGA | 74.7% |
| 806 | AGUAUCAGCAGAUCCACUA | 74.7% |
| 807 | CAGUAUCAGCAGAUCCACU | 74.7% |
| 808 | AUUAAGCAUCAAUGAACUG | 74.7% |
| 809 | AGGGUGGUGGUUAGCAUUG | 74.7% |
| 810 | AGAACUCCGAGAUUGCAAA | 74.7% |
| 811 | GAACVCCGAGAUUGCAAAA | 74.7% |
| 812 | GACAGAAGAUACGGACCAG | 74.6% |
| 813 | ACAGAAGAUACGGACCAGC | 74.6% |
| 814 | CAGAACUCUAUUCCAACAA | 74.6% |
| 815 | CAGAAUGCAGUUCUCUUCA | 74.6% |
| 816 | GCAGUAUCAGCAGAUCCAC | 74.6% |
| 817 | GGUGGUGGUUAGCAUUGAU | 74.6% |
| 818 | CUCCGAGAUUGCAAAAUUU | 74.6% |
| 819 | UCCGAGAUUGCAAAAUUUC | 74.6% |
| 820 | CAGAAGAUACGGACCAGCA | 74.6% |
| 821 | GAAGACAGAAGAUACGGAC | 74.5% |
| 822 | AGCCAGGAUACUAACAUCA | 74.5% |
| 823 | ACUCCGAGAUUGCAAAAUU | 74.5% |
| 824 | GAGGGUGGUGGUUAGCAUU | 74.5% |
| 825 | AAGACAGAAGAUACGGACC | 74.5% |
| 826 | GGAAGACAGAAGAUACGGA | 74.5% |
| 827 | ACCAACGUGGGAAUGUAUU | 74.4% |
| 828 | AGACAGAAGAUACGGACCA | 74.4% |
| 829 | CGAGAUUGCAAAAUUUCUC | 74.4% |
| 830 | CCGAGAUUGCAAAAUUUCU | 74.4% |
| 831 | UUAAGCAUCAAUGAACUGA | 74.4% |
| 832 | GACCAACGUGGGAAUGUAU | 74.4% |
| 833 | UAAAUGUGAGGGGAUCAGG | 74.2% |
| 834 | UGACUGUAAAUGUGAGGGG | 74.1% |
| 835 | UGGUGGGGAAAAGAGCAAC | 74.1% |
| 836 | GUUGCUGGCGGAACAAGCA | 74.1% |
| 837 | UUGCUGGCGGAACAAGCAG | 74.1% |
| 838 | CCAGUUGCUGGCGGAACAA | 74.0% |
| 839 | CACAAGAUGUAAUUAUGGA | 74.0% |
| 840 | ACAAGAUGUAAUUAUGGAA | 74.0% |
| 841 | AGGCACAAGAUGUAAUUAU | 74.0% |
| 842 | GCACAAGAUGUAAUUAUGG | 74.0% |
| 843 | AAGAUGUAAUUAUGGAAGU | 74.0% |
| 844 | AGAUGUAAUUAUGGAAGUU | 74.0% |
| 845 | GUAAAUGUGAGGGGAUCAG | 74.0% |
| 846 | GGCACAAGAUGUAAUUAUG | 74.0% |
| 847 | AACCUUGCAAAAGGGGAAA | 74.0% |
| 848 | ACCUUGCAAAAGGGGAAAA | 74.0% |
| 849 | CAGUUGCUGGCGGAACAAG | 74.0% |
| 850 | GAGGCACAAGAUGUAAUUA | 74.0% |
| 851 | CAGAUGAAAGCACAUCCGG | 73.9% |
| 852 | UUUCUCCCAGUUGCUGGCG | 73.9% |
| 853 | CUCCCAGUUGCUGGCGGAA | 73.9% |
| 854 | GGCGGAACAAGCAGUAUAU | 73.9% |
| 855 | AUGGUGGGGAAAAGAGCAA | 73.9% |
| 856 | UUCUCCCAGUUGCUGGCGG | 73.9% |
| 857 | UACAAGACUUAUUUUGACA | 73.9% |
| 858 | AAAUGUGAGGGGAUCAGGG | 73.9% |
| 859 | ACAAGACUUAUUUUGACAA | 73.9% |
| 860 | CAAGACUUAUUUUGACAAA | 73.9% |
| 861 | UCCCAGUUGCUGGCGGAAC | 73.9% |
| 862 | GCGGAACAAGCAGUAUAUA | 73.9% |
| 863 | AUUUCUCCCAGUUGCUGGC | 73.9% |
| 864 | CAAGAUGUAAUUAUGGAAG | 73.9% |
| 865 | AUAUGACUCCAAGCACAGA | 73.8% |
| 866 | CGGAACAAGCAGUAUAUAC | 73.8% |
| 867 | GAUAUGACUCCAAGCACAG | 73.8% |
| 868 | AGUUGCUGGCGGAACAAGC | 73.8% |
| 869 | UUGAGAAUCAGCUCAUCCU | 73.8% |
| 870 | AAAAGAGCAACAGCUAUAC | 73.8% |
| 871 | AAAGAGCAACAGCUAUACU | 73.8% |
| 872 | CCAGAUGAAAGCACAUCCG | 73.8% |
| 873 | CCCAGUUGCUGGCGGAACA | 73.8% |
| 874 | GACUGUAAAUGUGAGGGGA | 73.8% |
| 875 | CUGGCGGAACAAGCAGUAU | 73.8% |
| 876 | ACUGUAAAUGUGAGGGGAU | 73.8% |
| 877 | UGGCGGAACAAGCAGUAUA | 73.8% |
| 878 | UGUAAAUGUGAGGGGAUCA | 73.8% |
| 879 | CUGUAAAUGUGAGGGGAUC | 73.8% |
| 880 | GAAAGCACAUCCGGAGUGG | 73.7% |
| 881 | AAAGCACAUCCGGAGUGGA | 73.7% |
| 882 | UGCUGGCGGAACAAGCAGU | 73.7% |
| 883 | GAAGUGGGAGCCAGGAUAC | 73.7% |
| 884 | AAGUGGGAGCCAGGAUACU | 73.7% |
| 885 | CCAACGUGGGAAUGUAUUA | 73.7% |
| 886 | GCUGGCGGAACAAGCAGUA | 73.7% |
| 887 | AGUGGGAGCCAGGAUACUA | 73.7% |
| 888 | AAGACUUAUUUUGACAAAG | 73.6% |
| 889 | UGAAAGCACAUCCGGAGUG | 73.6% |
| 890 | UGGCCAUGGUGUUUUCACA | 73.6% |
| 891 | GUGGCCAUGGUGUUUUCAC | 73.6% |
| 892 | AUGAAUACUCCAGUACAGA | 73.5% |
| 893 | AUGAAGUGGGAGCCAGGAU | 73.5% |
| 894 | AAUGAAGUGGGAGCCAGGA | 73.5% |
| 895 | CCCAAUGAAGUGGGAGCCA | 73.5% |
| 896 | UGAAGUGGGAGCCAGGAUA | 73.5% |
| 897 | GGAACAUAGUAAGAAGAGC | 73.5% |
| 898 | AGGAACAUAGUAAGAAGAG | 73.5% |
| 899 | AAGCACAUCCGGAGUGGAG | 73.5% |
| 900 | CCCAGAUGAAAGCACAUCC | 73.5% |
| 901 | AUGAAAGCACAUCCGGAGU | 73.5% |
| 902 | UCUCCCAGUUGCUGGCGGA | 73.5% |
| 903 | GAUGAAUACUCCAGUACAG | 73.5% |
| 904 | AGACUUAUUUUGACAAAGU | 73.3% |
| 905 | CCAAUGAAGUGGGAGCCAG | 73.3% |
| 906 | AUGGCCAUCAAUUAAUGUU | 73.3% |
| 907 | UGGGGAAAAGAGCAACAGC | 73.2% |
| 908 | GAAUACUCCAGUACAGAGA | 73.2% |
| 909 | GAUGAAAGCACAUCCGGAG | 73.2% |
| 910 | GUGGGGAAAAGAGCAACAG | 73.2% |
| 911 | AAAUUGGCGGGACAAGGAU | 73.2% |
| 912 | GGCCAUGGUGUUUUCACAA | 73.2% |
| 913 | UGAAUACUCCAGUACAGAG | 73.2% |
| 914 | CAAAUUGGCGGGACAAGGA | 73.2% |
| 915 | AAUACAGUGGGUUUGUCAG | 73.2% |
| 916 | CAAUACAGUGGGUUUGUCA | 73.2% |
| 917 | AAUUGGCGGGACAAGGAUG | 73.2% |
| 918 | UAGGUAAGGAAGACAGAAG | 73.2% |
| 919 | CAAUGAAGUGGGAGCCAGG | 73.2% |
| 920 | AGAUGAAAGCACAUCCGGA | 73.2% |
| 921 | CCAAUACAGUGGGUUUGUC | 73.2% |
| 922 | GGUAAGGAAGACAGAAGAU | 73.2% |
| 923 | GUAAGGAAGACAGAAGAUA | 73.2% |
| 924 | GGUGGGGAAAAGAGCAACA | 73.1% |
| 925 | GUAUGGAAAGAAUAAAAGA | 73.1% |
| 926 | AAUACUCCAGUACAGAGAG | 73.1% |
| 927 | ACAAAUUGGCGGGACAAGG | 73.1% |
| 928 | GGAAAAGAGCAACAGCUAU | 73.0% |
| 929 | GUGGAUGAAUACUCCAGUA | 73.0% |
| 930 | UGGAUGAAUACUCCAGUAC | 73.0% |
| 931 | GAAAAGAGCAACAGCUAUA | 73.0% |
| 932 | GGAUGAAUACUCCAGUACA | 73.0% |
| 933 | AGGUAAGGAAGACAGAAGA | 73.0% |
| 934 | GGCAAGGAGACGUGGUGUU | 73.0% |
| 935 | GGGAAAAGAGCAACAGCUA | 73.0% |
| 936 | UAAGGAAGACAGAAGAUAC | 72.9% |
| 937 | GACCAGCAUUAAGCAUCAA | 72.9% |
| 938 | UAUUCCAACAAAUGAGAGA | 72.9% |
| 939 | GGACCAGCAUUAAGCAUCA | 72.9% |
| 940 | UAUGACUCCAAGCACAGAG | 72.9% |
| 941 | GGUGUGGAUGAAUACUCCA | 72.8% |
| 942 | UGGAAGUUGUUUUUCCCAA | 72.8% |
| 943 | GUGACAUGGUGGAAUAGAA | 72.8% |
| 944 | AUGGAAGUUGUUUUUCCCA | 72.8% |
| 945 | ACCAGCAUUAAGCAUCAAU | 72.8% |
| 946 | UGACAUGGUGGAAUAGAAA | 72.8% |
| 947 | AACAAGAUUUCUCCCAGUU | 72.8% |
| 948 | GGGGAAAAGAGCAACAGCU | 72.8% |
| 949 | GAAGUUGUUUUUCCCAAUG | 72.8% |
| 950 | GGAAGUUGUUUUUCCCAAU | 72.8% |
| 951 | AAGUUGUUUUUCCCAAUGA | 72.8% |
| 952 | GGGUGUGGAUGAAUACUCC | 72.8% |
| 953 | CAAUAGCCGAAGCAAUAAU | 72.7% |
| 954 | UCAAUAGCCGAAGCAAUAA | 72.7% |
| 955 | AAAACAAGAUUUCUCCCAG | 72.7% |
| 956 | GAAAAACAAGAUUUCUCCC | 72.7% |
| 957 | AAACAAGAUUUCUCCCAGU | 72.7% |
| 958 | GUGUGGAUGAAUACUCCAG | 72.7% |
| 959 | ACAAGAUUUCUCCCAGUUG | 72.7% |
| 960 | CAAGAUUUCUCCCAGUUGC | 72.7% |
| 961 | UGGGUGUGGAUGAAUACUC | 72.7% |
| 962 | UUCAUUUUAGAAAUCAAGU | 72.6% |
| 963 | CAGUCAAUAGCCGAAGCAA | 72.6% |
| 964 | AUACAGUGGGUUUGUCAGA | 72.6% |
| 965 | ACAGUGGGUUUGUCAGAAC | 72.6% |
| 966 | GUCAAUAGCCGAAGCAAUA | 72.6% |
| 967 | UACAGUGGGUUUGUCAGAA | 72.6% |
| 968 | AAGAUUUCUCCCAGUUGCU | 72.6% |
| 969 | GUUCAUUUUAGAAAUCAAG | 72.6% |
| 970 | GGGCAAGGAGACGUGGUGU | 72.6% |
| 971 | AUGGGUGUGGAUGAAUACU | 72.6% |
| 972 | UCAUUUUAGAAAUCAAGUC | 72.6% |
| 973 | UUCAGCUCAUAGUGAGUGG | 72.5% |
| 974 | CCAGAUAUGACUCCAAGCA | 72.5% |
| 975 | CAAAGCAAAGCAGAAUGCA | 72.5% |
| 976 | AGUCAAUAGCCGAAGCAAU | 72.5% |
| 977 | CCAAAGCAAAGCAGAAUGC | 72.5% |
| 978 | UACAACAAGACCACUAAAA | 72.4% |
| 979 | AGAAAUCAAGUCAAGAUAC | 72.4% |
| 980 | AGCAAAGCAGAAUGCAGUU | 72.4% |
| 981 | CAGAUAUGACUCCAAGCAC | 72.4% |
| 982 | GUAAAAUGAGUGAUGCUGG | 72.4% |
| 983 | GAAAUCAAGUCAAGAUACG | 72.4% |
| 984 | UUAUGGAAGUUGUUUUUCC | 72.4% |
| 985 | CAACAAGACCACUAAAAGA | 72.4% |
| 986 | AAAGCAAAGCAGAAUGCAG | 72.4% |
| 987 | UACCAGAUAUGACUCCAAG | 72.4% |
| 988 | AGAUAUGACUCCAAGCACA | 72.4% |
| 989 | AUUAUGGAAGUUGUUUUUC | 72.4% |
| 990 | ACAACAAGACCACUAAAAG | 72.4% |
| 991 | AAGCAAAGCAGAAUGCAGU | 72.4% |
| 992 | GAGUAAAAUGAGUGAUGCU | 72.4% |
| 993 | AGUAAAAUGAGUGAUGCUG | 72.4% |
| 994 | ACCAGAUAUGACUCCAAGC | 72.4% |
| 995 | UGUGGAUGAAUACUCCAGU | 72.4% |
| 996 | AAAAACAAGAUUUCUCCCA | 72.4% |
| 997 | GCAAAGCAGAAUGCAGUUC | 72.3% |
| 998 | GAUUGGUUCAGCUCAUAGU | 72.3% |
| 999 | UUUUAGAAAUCAAGUCAAG | 72.3% |
| 1000 | UAUGGAAGUUGUUUUUCCC | 72.3% |
| 1001 | AGAUUGGUUCAGCUCAUAG | 72.3% |
| 1002 | AAUGGGUGUGGAUGAAUAC | 72.3% |
| 1003 | UUUAGAAAUCAAGUCAAGA | 72.3% |
| 1004 | CUACAACAAGACCACUAAA | 72.3% |
| 1005 | UAGAAAUCAAGUCAAGAUA | 72.3% |
| 1006 | UUAGAAAUCAAGUCAAGAU | 72.3% |
| 1007 | UUACCAGAUAUGACUCCAA | 72.3% |
| 1008 | ACCAAAGCAAAGCAGAAUG | 72.2% |
| 1009 | ACAAUGGUGGGGAAAAGAG | 72.2% |
| 1010 | CAAUGGUGGGGAAAAGAGC | 72.2% |
| 1011 | CCCUUGAUGGUUGCAUACA | 72.2% |
| 1012 | CACCAAAGCAAAGCAGAAU | 72.2% |
| 1013 | AAUGGUGGGGAAAAGAGCA | 72.2% |
| 1014 | AAAUGGGUGUGGAUGAAUA | 72.2% |
| 1015 | CAAAAUGGGUGUGGAUGAA | 72.2% |
| 1016 | AAAAUGGGUGUGGAUGAAU | 72.2% |
| 1017 | AAGAAGAACUCCGAGAUUG | 72.2% |
| 1018 | GCAAAAUGGGUGUGGAUGA | 72.2% |
| 1019 | CCUUGAUGGUUGCAUACAU | 72.2% |
| 1020 | AGAAGAACUCCGAGAUUGC | 72.2% |
| 1021 | CUUGAUGGUUGCAUACAUG | 72.2% |
| 1022 | AGCAAAAUGGGUGUGGAUG | 72.2% |
| 1023 | CCACCAAAGCAAAGCAGAA | 72.2% |
| 1024 | AAAGAAGAACUCCGAGAUU | 72.2% |
| 1025 | UAUUACCAGAUAUGACUCC | 72.1% |
| 1026 | CAGCAAAAUGGGUGUGGAU | 72.1% |
| 1027 | UGGUUCAGCUCAUAGUGAG | 72.1% |
| 1028 | GUUCAGCUCAUAGUGAGUG | 72.1% |
| 1029 | AAGAGUCAGCAAAAUGGGU | 72.1% |
| 1030 | GUCAGCAAAAUGGGUGUGG | 72.1% |
| 1031 | UCAGCAAAAUGGGUGUGGA | 72.1% |
| 1032 | ACCUGAAUUUCGUCAACAG | 72.0% |
| 1033 | CUCCCUUGAUGGUUGCAUA | 72.0% |
| 1034 | CUAUUCCAACAAAUGAGAG | 72.0% |
| 1035 | UCCCUUGAUGGUUGCAUAC | 72.0% |
| 1036 | UCUCCCUUGAUGGUUGCAU | 72.0% |
| 1037 | GGUUCAGCUCAUAGUGAGU | 72.0% |
| 1038 | AUUACCAGAUAUGACUCCA | 72.0% |
| 1039 | CAUCCGGAGUGGAGUCCGC | 72.0% |
| 1040 | GACCUGAAUUUCGUCAACA | 72.0% |
| 1041 | UUGGUUCAGCUCAUAGUGA | 72.0% |
| 1042 | CCAAAAGUAUACAAGACUU | 71.9% |
| 1043 | ACUGAAGAACAAGCUGUGG | 71.9% |
| 1044 | CUGAAGAACAAGCUGUGGA | 71.9% |
| 1045 | CAAAAGUAUACAAGACUUA | 71.9% |
| 1046 | AUUGGGAAGCUGUCAAAAU | 71.9% |
| 1047 | AAAGAUGCCGGCACUUUAA | 71.9% |
| 1048 | AUUGGUUCAGCUCAUAGUG | 71.9% |
| 1049 | UGAAGAACAAGCUGUGGAU | 71.9% |
| 1050 | AAUUGGGAAGCUGUCAAAA | 71.9% |
| 1051 | AGUCAGCAAAAUGGGUGUG | 71.7% |
| 1052 | ACAUCCGGAGUGGAGUCCG | 71.7% |
| 1053 | UGCAAAAUUUCUCCCUUGA | 71.7% |
| 1054 | AAAAUUUCUCCCUUGAUGG | 71.7% |
| 1055 | UUUUGGUCAAUACCUAUCA | 71.7% |
| 1056 | GCAAAAUUUCUCCCUUGAU | 71.7% |
| 1057 | CAAAAUUUCUCCCUUGAUG | 71.7% |
| 1058 | CACAAUGGUGGGGAAAAGA | 71.7% |
| 1059 | AAAUUUCUCCCUUGAUGGU | 71.7% |
| 1060 | GAGUUCGAGACCAACGUGG | 71.6% |
| 1061 | AUUUCUCCCUUGAUGGUUG | 71.6% |
| 1062 | UGUUGGUAAUGAAACGAAA | 71.6% |
| 1063 | UAUACAAGACUUAUUUUGA | 71.6% |
| 1064 | UGGGAAGCUGUCAAAAUUC | 71.6% |
| 1065 | GAGAGUUCGAGACCAACGU | 71.6% |
| 1066 | AAAUUGGGAAGCUGUCAAA | 71.6% |
| 1067 | AGUAUACAAGACUUAUUUU | 71.6% |
| 1068 | GUGUUGGUAAUGAAACGAA | 71.6% |
| 1069 | AAGUAUACAAGACUUAUUU | 71.6% |
| 1070 | AAAGUAUACAAGACUUAUU | 71.6% |
| 1071 | AGAGUUCGAGACCAACGUG | 71.6% |
| 1072 | GAAAAGAUGCCGGCACUUU | 71.6% |
| 1073 | UUCUCCCUUGAUGGUUGCA | 71.6% |
| 1074 | GGAAAAGAUGCCGGCACUU | 71.6% |
| 1075 | GUAUACAAGACUUAUUUUG | 71.6% |
| 1076 | UUGGGAAGCUGUCAAAAUU | 71.6% |
| 1077 | GGGAAGCUGUCAAAAUUCA | 71.6% |
| 1078 | AGAUUGCAAAAUUUCUCCC | 71.6% |
| 1079 | GUUGGUAAUGAAACGAAAA | 71.6% |
| 1080 | UUUCUCCCUUGAUGGUUGC | 71.6% |
| 1081 | AAUUAUGGAAGUUGUUUUU | 71.5% |
| 1082 | UGUUUUUCCCAAUGAAGUG | 71.5% |
| 1083 | AUUGCAAAAUUUCUCCCUU | 71.5% |
| 1084 | UUUUUCCCAAUGAAGUGGG | 71.5% |
| 1085 | GUUUUUCCCAAUGAAGUGG | 71.5% |
| 1086 | AAUUUCUCCCUUGAUGGUU | 71.5% |
| 1087 | UUCUCGGAAAAGAUGCCGG | 71.5% |
| 1088 | UUUGGUCAAUACCUAUCAA | 71.5% |
| 1089 | GAUUGCAAAAUUUCUCCCU | 71.5% |
| 1090 | AAAAGUAUACAAGACUUAU | 71.5% |
| 1091 | ACCCAAAAGUAUACAAGAC | 71.5% |
| 1092 | GUUUUGGUCAAUACCUAUC | 71.5% |
| 1093 | CACAUCCGGAGUGGAGUCC | 71.5% |
| 1094 | UUGUUUUUCCCAAUGAAGU | 71.5% |
| 1095 | GAAAUUGGGAAGCUGUCAA | 71.4% |
| 1096 | CGGAAAAGAUGCCGGCACU | 71.4% |
| 1097 | UCCACCAAAGCAAAGCAGA | 71.4% |
| 1098 | AGAAAUUGGGAAGCUGUCA | 71.4% |
| 1099 | AAGCUGUCAAAAUUCAAUG | 71.4% |
| 1100 | UAUGAGGAGUUCACAAUGG | 71.4% |
| 1101 | UCGGAAAAGAUGCCGGCAC | 71.4% |
| 1102 | GGAAGCUGUCAAAAUUCAA | 71.4% |
| 1103 | GCUGUCAAAAUUCAAUGGU | 71.4% |
| 1104 | AUGAGGAGUUCACAAUGGU | 71.4% |
| 1105 | GAAGCUGUCAAAAUUCAAU | 71.4% |
| 1106 | AGUUGUUUUUCCCAAUGAA | 71.4% |
| 1107 | GUUGUUUUUCCCAAUGAAG | 71.4% |
| 1108 | UUGCAAAAUUUCUCCCUUG | 71.4% |
| 1109 | AGCUGUCAAAAUUCAAUGG | 71.4% |
| 1110 | CUCGGAAAAGAUGCCGGCA | 71.4% |
| 1111 | GAACAGUCAAUAGCCGAAG | 71.3% |
| 1112 | UACCCAAAAGUAUACAAGA | 71.3% |
| 1113 | UCAAUGAUGUGGGAGAUUA | 71.3% |
| 1114 | AAAAGAUGCCGGCACUUUA | 71.3% |
| 1115 | GACAUGGUGGAAUAGAAAU | 71.3% |
| 1116 | CAAUGAUGUGGGAGAUUAA | 71.3% |
| 1117 | GAAUAAAAGAACUACGGAA | 71.3% |
| 1118 | AUCAGAAAUUGGGAAGCUG | 71.3% |
| 1119 | GUGACCUGAAUUUCGUCAA | 71.3% |
| 1120 | AGGUGACCUGAAUUUCGUC | 71.3% |
| 1121 | GGUGACCUGAAUUUCGUCA | 71.3% |
| 1122 | UCAGAAAUUGGGAAGCUGU | 71.2% |
| 1123 | UGACCUGAAUUUCGUCAAC | 71.2% |
| 1124 | CCCAAAAGUAUACAAGACU | 71.2% |
| 1125 | AUACAAGACUUAUUUUGAC | 71.2% |
| 1126 | UCUCGGAAAAGAUGCCGGC | 71.2% |
| 1127 | CCUGAGUCGGUUUUGGUCA | 71.2% |
| 1128 | AACAGUCAAUAGCCGAAGC | 71.2% |
| 1129 | CUGAGUCGGUUUUGGUCAA | 71.2% |
| 1130 | AGUCGGUUUUGGUCAAUAC | 71.2% |
| 1131 | GAGUCGGUUUUGGUCAAUA | 71.2% |
| 1132 | CAGAAAUUGGGAAGCUGUC | 71.1% |
| 1133 | UUUUCCCAAUGAAGUGGGA | 71.1% |
| 1134 | UUCCCAAUGAAGUGGGAGC | 71.1% |
| 1135 | UUUCCCAAUGAAGUGGGAG | 71.1% |
| 1136 | AGACCAACGUGGGAAUGUA | 71.0% |
| 1137 | AAGAUGCCGGCACUUUAAU | 71.0% |
| 1138 | UGAGUCGGUUUUGGUCAAU | 71.0% |
| 1139 | AAAUCAAGUCAAGAUACGC | 71.0% |
| 1140 | CGGUUUUGGUCAAUACCUA | 71.0% |
| 1141 | UCGGUUUUGGUCAAUACCU | 71.0% |
| 1142 | CGAGACCAACGUGGGAAUG | 71.0% |
| 1143 | GAGACCAACGUGGGAAUGU | 71.0% |
| 1144 | AGAUGCCGGCACUUUAAUU | 71.0% |
| 1145 | GAUGCCGGCACUUUAAUUG | 70.9% |
| 1146 | AUGCCGGCACUUUAAUUGA | 70.9% |
| 1147 | UGCCGGCACUUUAAUUGAA | 70.9% |
| 1148 | GCCGGCACUUUAAUUGAAG | 70.8% |
| 1149 | UGAGGAGUUCACAAUGGUG | 70.8% |
| 1150 | CCGGCACUUUAAUUGAAGA | 70.8% |
| 1151 | AGUUCGAGACCAACGUGGG | 70.8% |
| 1152 | AAUGUAUUAUUAUCUCCUG | 70.8% |
| 1153 | UCAUCAGAAAUUGGGAAGC | 70.8% |
| 1154 | UUCGAGACCAACGUGGGAA | 70.8% |
| 1155 | AUCAUCAGAAAUUGGGAAG | 70.8% |
| 1156 | AUGUAUUAUUAUCUCCUGA | 70.8% |
| 1157 | UCGAGACCAACGUGGGAAU | 70.8% |
| 1158 | GUUCGAGACCAACGUGGGA | 70.8% |
| 1159 | GGUUUUGGUCAAUACCUAU | 70.8% |
| 1160 | GGAAUGUAUUAUUAUCUCC | 70.7% |
| 1161 | GGGAAUGUAUUAUUAUCUC | 70.7% |
| 1162 | CAUCAGAAAUUGGGAAGCU | 70.7% |
| 1163 | UCCCAAUGAAGUGGGAGCC | 70.6% |
| 1164 | UAAGGCCAUUAGAGGCCAA | 70.6% |
| 1165 | GUCGGUUUUGGUCAAUACC | 70.6% |
| 1166 | GGUCCUGAGUCGGUUUUGG | 70.6% |
| 1167 | GUCCUGAGUCGGUUUUGGU | 70.6% |
| 1168 | CUAAGGCCAUUAGAGGCCA | 70.6% |
| 1169 | CCUAAGGCCAUUAGAGGCC | 70.6% |
| 1170 | CGGCACUUUAAUUGAAGAC | 70.6% |
| 1171 | ACAGUCAAUAGCCGAAGCA | 70.5% |
| 1172 | UUCUCAUUAUAGGUAAGGA | 70.3% |
| 1173 | UCCUGAGUCGGUUUUGGUC | 70.3% |
| 1174 | CUCAUUAUAGGUAAGGAAG | 70.3% |
| 1175 | UCAUUAUAGGUAAGGAAGA | 70.3% |
| 1176 | UUUCUCAUUAUAGGUAAGG | 70.3% |
| 1177 | GAAUGUAUUAUUAUCUCCU | 70.1% |
| 1178 | UCUCAUUAUAGGUAAGGAA | 70.1% |
| 1179 | GAUCAGAUCGAGUGAUGGU | 70.1% |
| 1180 | GGAUCAGAUCGAGUGAUGG | 70.1% |
| 1181 | AUGGGAAUGGUUGGAGUAU | 70.0% |
| 1182 | UGGGAAUGGUUGGAGUAUU | 70.0% |

TABLE 2-2

Conserved 19-mer sequences that are present in
at least 70% of the Influenza A segment 2 (PB1)
sequences listed in Table 1-2.

| | | |
|---|---|---|
| Seq ID | Sequence | Percent |

| | | |
|---|---|---|
| 1183 | AUGAUGAUGGGCAUGUUCA | 96.7% |
| 1184 | UGAUGAUGGGCAUGUUCAA | 96.7% |
| 1185 | AUCUGUUCCACCAUUGAAG | 91.1% |
| 1186 | UCUGUUCCACCAUUGAAGA | 91.1% |
| 1187 | GAUCUGUUCCACCAUUGAA | 90.9% |
| 1188 | GAAGAUCUGUUCCACCAUU | 90.8% |
| 1189 | AAGAUCUGUUCCACCAUUG | 90.7% |
| 1190 | UGAAGAUCUGUUCCACCAU | 90.7% |
| 1191 | AGAUCUGUUCCACCAUUGA | 90.7% |
| 1192 | UGAUAAACAAUGACCUUGG | 90.5% |
| 1193 | AUGAUAAACAAUGACCUUG | 90.5% |
| 1194 | CCAUACAGCCAUGGAACAG | 89.2% |
| 1195 | CAUACAGCCAUGGAACAGG | 89.2% |
| 1196 | GAGGCCAUGGUGUCUAGGG | 89.1% |
| 1197 | AGGCCAUGGUGUCUAGGGC | 89.1% |
| 1198 | GGAGGCCAUGGUGUCUAGG | 89.0% |
| 1199 | UGGAGGCCAUGGUGUCUAG | 88.9% |
| 1200 | GAGAUCAUGAAGAUCUGUU | 88.8% |
| 1201 | ACCAAGAAAAUGGUCACAC | 88.7% |
| 1202 | CCAAGAAAAUGGUCACACA | 88.7% |
| 1203 | UGACCAAGAAAAUGGUCAC | 88.7% |
| 1204 | AUGACCAAGAAAAUGGUCA | 88.7% |
| 1205 | CAUGAAGAUCUGUUCCACC | 88.6% |
| 1206 | AUGAAGAUCUGUUCCACCA | 88.6% |
| 1207 | CAAGAAAAUGGUCACACAA | 88.6% |
| 1208 | UCAUGAAGAUCUGUUCCAC | 88.5% |
| 1209 | AUCAUGAAGAUCUGUUCCA | 88.5% |
| 1210 | GAUGGGCAUGUUCAACAUG | 88.4% |
| 1211 | UGAUGGGCAUGUUCAACAU | 88.4% |
| 1212 | AUGAGGGAAUACAAGCAGG | 88.4% |
| 1213 | ACAUGACCAAGAAAAUGGU | 88.4% |
| 1214 | CAUGAGGGAAUACAAGCAG | 88.4% |
| 1215 | GAUGAUGGGCAUGUUCAAC | 88.4% |
| 1216 | AACAUGACCAAGAAAAUGG | 88.4% |
| 1217 | AUGAUGGGCAUGUUCAACA | 88.4% |
| 1218 | CAUGACCAAGAAAAUGGUC | 88.3% |
| 1219 | CUCAUAGUGAAUGCACCAA | 88.3% |
| 1220 | GACCAAGAAAAUGGUCACA | 88.3% |
| 1221 | UCAUAGUGAAUGCACCAAA | 88.3% |
| 1222 | AUGGGCAUGUUCAACAUGC | 88.2% |
| 1223 | ACAACAUGACCAAGAAAAU | 88.2% |
| 1224 | AUAGUGAAUGCACCAAAUC | 88.2% |
| 1225 | UAGUGAAUGCACCAAAUCA | 88.2% |
| 1226 | GCCAUGGUGUCUAGGGCCC | 88.2% |
| 1227 | GACAACAUGACCAAGAAAA | 88.2% |
| 1228 | UGGGCAUGUUCAACAUGCU | 88.2% |
| 1229 | CCAUGGUGUCUAGGGCCCG | 88.2% |
| 1230 | CAACAUGACCAAGAAAAUG | 88.2% |
| 1231 | UGAAUGCACCAAAUCAUGA | 88.1% |
| 1232 | GUGAAUGCACCAAAUCAUG | 88.0% |
| 1233 | AGAUCAUGAAGAUCUGUUC | 88.0% |
| 1234 | UCAUGAGGGAAUACAAGCA | 88.0% |
| 1235 | CAGCGCAAAAUGCCAUAAG | 88.0% |
| 1236 | GAAUUCUUGAGGAUGAACA | 88.0% |
| 1237 | GAUCAUGAAGAUCUGUUCC | 88.0% |
| 1238 | AGUGAAUGCACCAAAUCAU | 88.0% |
| 1239 | GGAAUUCUUGAGGAUGAAC | 88.0% |
| 1240 | GGCCAUGGUGUCUAGGGCC | 87.9% |
| 1241 | AUCAUGAGGGAAUACAAGC | 87.9% |
| 1242 | CAUAGUGAAUGCACCAAAU | 37.9% |
| 1243 | CCUCCAUACAGCCAUGGAA | 87.8% |
| 1244 | AUACAAGCAGGAGUGGAUA | 87.8% |
| 1245 | CUCCAUACAGCCAUGGAAC | 87.8% |
| 1246 | AAUCAUGAGGGAAUACAAG | 87.6% |
| 1247 | UCCAUACAGCCAUGGAACA | 87.6% |
| 1248 | UACAAGCAGGAGUGGAUAG | 87.6% |
| 1249 | UGUUCUCAAACAAAAUGGC | 87.5% |
| 1250 | AUGUUCUCAAACAAAAUGG | 87.5% |
| 1251 | UCACACAAAGAACAAUAGG | 87.5% |
| 1252 | AUGGUCACACAAAGAACAA | 87.4% |
| 1253 | UACACCAUGGACACAGUCA | 87.4% |
| 1254 | UGGUCACACAAAGAACAAU | 87.4% |
| 1255 | GUCACACAAAGAACAAUAG | 87.4% |
| 1256 | GGUCACACAAAGAACAAUA | 87.4% |
| 1257 | ACACCAUGGACACAGUCAA | 87.4% |
| 1258 | CCAGCGCAAAAUGCCAUAA | 87.3% |
| 1259 | GCAUGGUGGAGGCCAUGGU | 87.3% |
| 1260 | UUGAUGGACCACUACCUGA | 87.3% |
| 1261 | AGCAUGGUGGAGGCCAUGG | 87.3% |
| 1262 | AAUGCACCAAAUCAUGAGG | 87.2% |
| 1263 | AAUGUUCUCAAACAAAAUG | 87.2% |
| 1264 | AUGCACCAAAUCAUGAGGG | 87.2% |
| 1265 | AUGGUGGAGGCCAUGGUGU | 87.2% |
| 1266 | GGUGGAGGCCAUGGUGUCU | 87.2% |
| 1267 | AUUGAUGGACCACUACCUG | 87.2% |
| 1268 | UGGUGGAGGCCAUGGUGUC | 87.2% |
| 1269 | AUAAUGUUCUCAAACAAAA | 87.2% |
| 1270 | UAAUGUUCUCAAACAAAAU | 87.2% |
| 1271 | GUGGAGGCCAUGGUGUCUA | 87.1% |
| 1272 | UGGCAAAUGUUGUGAGAAA | 87.1% |
| 1273 | GAAUGCACCAAAUCAUGAG | 87.1% |
| 1274 | AAUGGUCACACAAAGAACA | 87.0% |
| 1275 | GAUCCUCCAUACAGCCAUG | 86.9% |
| 1276 | AUCCUCCAUACAGCCAUGG | 86.9% |
| 1277 | CAUGGUGGAGGCCAUGGUG | 86.7% |
| 1278 | AAAUGGUCACACAAAGAAC | 86.6% |
| 1279 | GCAUGUUCAACAUGCUAAG | 86.6% |
| 1280 | AGGGAAUACAAGCAGGAGU | 86.6% |
| 1281 | GGGCAUGUUCAACAUGCUA | 86.6% |
| 1282 | GGCAUGUUCAACAUGCUAA | 86.6% |
| 1283 | ACCAUGGACACAGUCAACA | 86.6% |
| 1284 | GAUAUGCACAAACAGACUG | 86.6% |
| 1285 | AAAAUGGUCACACAAAGAA | 86.6% |
| 1286 | CCAUGGACACAGUCAACAG | 86.6% |
| 1287 | GGAUAUGCACAAACAGACU | 86.6% |
| 1288 | CACCAUGGACACAGUCAAC | 86.5% |
| 1289 | ACACAGUCAACAGAACACA | 86.5% |
| 1290 | GACACAGUCAACAGAAGAC | 86.5% |
| 1291 | GAGGGAAUACAAGCAGGAG | 86.5% |
| 1292 | AUGUUCAACAUGCUAAGUA | 86.4% |
| 1293 | ACAUUCCCUUAUACUGGAG | 86.4% |
| 1294 | UGUUCAACAUGCUAAGUAC | 86.4% |
| 1295 | CAUUCCCUUAUACUGGAGA | 86.4% |
| 1296 | AAGAAAAUGGUCACACAAA | 86.3% |
| 1297 | AAUACAAGCAGGAGUGGAU | 86.3% |
| 1298 | AGAAAAUGGUCACACAAAG | 86.3% |
| 1299 | GAAUACAAGCAGGAGUGGA | 86.3% |
| 1300 | GGAAUACAAGCAGGAGUGG | 86.3% |
| 1301 | UGAGGGAAUACAAGCAGGA | 86.3% |
| 1302 | GGGAAUACAAGCAGGAGUG | 86.3% |
| 1303 | GGACACAGUCAACAGAACA | 86.2% |
| 1304 | AAGCAGGAGUGGAUAGAUU | 86.2% |
| 1305 | UUGAGGAUGAACAGAUGUA | 86.2% |
| 1306 | UGGACACAGUCAACAGAAC | 86.2% |
| 1307 | AUGGACACAGUCAACAGAA | 86.2% |
| 1308 | AAAUCAUGAGGGAAUACAA | 86.2% |
| 1309 | CAAGCAGGAGUGGAUAGAU | 86.2% |
| 1310 | CAAAUCAUGAGGGAAUACA | 86.0% |
| 1311 | CAUGGACACAGUCAACAGA | 86.0% |
| 1312 | CUUGAGGAUGAACAGAUGU | 86.0% |
| 1313 | ACAAGCAGGAGUGGAUAGA | 86.0% |
| 1314 | CAUGUUCAACAUGCUAAGU | 85.9% |
| 1315 | UAACAGUGAUAAAGAACAA | 85.9% |
| 1316 | GAAAAUGGUCACACAAAGA | 85.8% |
| 1317 | UGCACCAAAUCAUGAGGGA | 85.7% |
| 1318 | GGCUAAUAGAUUUCCUCAA | 85.7% |
| 1319 | UCCUCCAUACAGCCAUGGA | 85.6% |
| 1320 | CACCAAAUCAUGAGGGAAU | 85.6% |
| 1321 | CCAAAUCAUGAGGGAAUAC | 85.6% |
| 1322 | ACCAAAUCAUGAGGGAAUA | 85.6% |
| 1323 | GCACCAAAUCAUGAGGGAA | 85.6% |
| 1324 | GUAACAGUGAUAAAGAACA | 85.6% |
| 1325 | UCUUGAGGAUGAACAGAUG | 85.5% |
| 1326 | AAUUCUUGAGGAUGAACAG | 85.5% |
| 1327 | AGAUCCUCCAUACAGCCAU | 85.5% |
| 1328 | UUCCAGCGCAAAAUGCCAU | 85.5% |
| 1329 | CUGGAGAUCCUCCAUACAG | 85.5% |
| 1330 | ACAACAUGAUAAACAAUGA | 85.5% |
| 1331 | GAGAUCCUCCAUACAGCCA | 85.5% |
| 1332 | AACAACAUGAUAAACAAUG | 85.5% |
| 1333 | ACUGGAGAUCCUCCAUACA | 85.5% |
| 1334 | GGAGAUCCUCCAUACAGCC | 85.5% |
| 1335 | UCCAGCGCAAAAUGCCAUA | 85.5% |
| 1336 | UUCUUGAGGAUGAACAGAU | 85.5% |
| 1337 | AUUCUUGAGGAUGAACAGA | 85.5% |
| 1338 | AGGGGAAUUCUUGAGGAUG | 85.4% |
| 1339 | UGGAGAUCCUCCAUACAGC | 85.4% |
| 1340 | AUGAUGACUAAUUCACAAG | 85.4% |
| 1341 | UGAUGACUAAUUCACAAGA | 85.4% |
| 1342 | GUGGAUAUGCACAAACAGA | 85.4% |
| 1343 | UGGAUAUGCACAAACAGAC | 85.3% |
| 1344 | AGUGAUAAAGAACAACAUG | 85.3% |
| 1345 | ACAGUGAUAAAGAACAACA | 85.3% |
| 1346 | GGGGAAUUCUUGAGGAUGA | 85.3% |
| 1347 | UAAAGAACAACAUGAUAAA | 85.3% |
| 1348 | CAGUGAUAAAGAACAACAU | 85.3% |
| 1349 | UUGACUUCGAGUCUGGACG | 85.3% |
| 1350 | AAAGAACAACAUGAUAAAC | 85.2% |
| 1351 | AGAACAACAUGAUAAACAA | 85.2% |
| 1352 | GGGAAUUCUUGAGGAUGAA | 85.2% |
| 1353 | CAGGAGUGGAUAGAUUCUA | 85.2% |
| 1354 | AGUGGAUAUGCACAAACAG | 85.2% |
| 1355 | AAGAACAACAUGAUAAACA | 85.2% |
| 1356 | AUAAAGAACAACAUGAUAA | 85.2% |
| 1357 | UGGUGUCUAGGGCCCGGAU | 85.0% |
| 1358 | UGAUAAAGAACAACAUGAU | 85.0% |
| 1359 | AGCAGGAGUGGAUAGAUUC | 85.0% |
| 1360 | GUGAUAAAGAACAACAUGA | 85.0% |
| 1361 | GCAGGAGUGGAUAGAUUCU | 85.0% |
| 1362 | GAUAAAGAACAACAUGAUA | 85.0% |
| 1363 | AUGGUGUCUAGGGCCCGGA | 85.0% |
| 1364 | UGUCUAGGGCCCGGAUUGA | 85.0% |
| 1365 | CAUGGUGUCUAGGGCCCGG | 84.9% |
| 1366 | GAACAACAUGAUAAACAAU | 84.9% |
| 1367 | UGACUAAUUCACAAGACAC | 84.8% |
| 1368 | GGAAGGCUAAUAGAUUUCC | 84.8% |
| 1369 | UUCCCUUAUACUGGAGAUC | 84.8% |
| 1370 | UCCCUUAUACUGGAGAUCC | 84.8% |
| 1371 | GAAGGCUAAUAGAUUUCCU | 84.8% |
| 1372 | AUUGACUUCGAGUCUGGAC | 84.8% |
| 1373 | GGUGUCUAGGGCCCGGAUU | 84.8% |
| 1374 | UAAUAGAUUUCCUCAAGGA | 84.8% |
| 1375 | AACAGUGAUAAAGAACAAC | 84.8% |
| 1376 | GUGUCUAGGGCCCGGAUUG | 84.8% |
| 1377 | ACUUCGAGUCUGGACGGAU | 84.7% |
| 1378 | ACAUGAUAAACAAUGACCU | 84.7% |
| 1379 | GUUCCAGCGCAAAAUGCCA | 84.7% |
| 1380 | AUGACUAAUUCACAAGACA | 84.7% |
| 1381 | AACAUGAUAAACAAUGACC | 84.7% |
| 1382 | CUAGGGCCCGGAUUGAUGC | 84.7% |
| 1383 | GAUGACUAAUUCACAAGAC | 84.7% |
| 1384 | UCUAGGGCCCGGAUUGAUG | 84.7% |
| 1385 | AUUCCCUUAUACUGGAGAU | 84.7% |
| 1386 | UUGCAACUACACACUCCUG | 84.6% |
| 1387 | UAAGAGACAACAUGACCAA | 84.6% |
| 1388 | UGCAACUACACACUCCUGG | 84.6% |
| 1389 | CAACAUGAUAAACAAUGAC | 84.6% |
| 1390 | GUUGCAACUACACACUCCU | 84.6% |
| 1391 | CCAGCAACAGCCCAGAUGG | 84.6% |
| 1392 | CAGCAACAGCCCAGAUGGC | 84.6% |
| 1393 | GACUUCGAGUCUGGACGGA | 84.5% |
| 1394 | AACUGGCAAAUGUUGUGAG | 84.5% |
| 1395 | GCAACUACACACUCCUGGA | 84.5% |
| 1396 | CUGGCAAAUGUUGUGAGAA | 84.5% |
| 1397 | AAACUGGCAAAUGUUGUGA | 84.5% |
| 1398 | AAGUGGGAGCUAAUGGAUG | 84.5% |
| 1399 | CUAAUAGAUUUCCUCAAGG | 84.5% |
| 1400 | AGUGGGAGCUAAUGGAUGA | 84.5% |
| 1401 | UAUGCACAAACAGACUGUG | 84.3% |
| 1402 | CAACUACACACUCCUGGAU | 84.3% |
| 1403 | ACUGGCAAAUGUUGUGAGA | 84.3% |
| 1404 | AUGCACAAACAGACUGUGU | 84.3% |
| 1405 | UGAAUGGAUGUCAAUCCGA | 84.2% |
| 1406 | GAAUGGAUGUCAAUCCGAC | 84.2% |
| 1407 | GAGUCUGGACGGAUUAAGA | 84.2% |
| 1408 | UGACUUCGAGUCUGGACGG | 84.2% |
| 1409 | GUCUAGGGCCCGGAUUGAU | 84.1% |
| 1410 | AACUACACACUCCUGGAUU | 84.1% |
| 1411 | UUGAAUGGAUGUCAAUCCG | 84.1% |
| 1412 | GAGACAACAUGACCAAGAA | 84.1% |
| 1413 | AGGCUAAUAGAUUUCCUCA | 84.1% |
| 1414 | CGCAAAAUGCCAUAAGCAC | 84.1% |
| 1415 | AGUCUGGACGGAUUAAGAA | 84.1% |
| 1416 | AUAUGCACAAACAGACUGU | 84.1% |
| 1417 | UUUGAAUGGAUGUCAAUCC | 84.0% |
| 1418 | GCGCAAAAUGCCAUAAGCA | 84.0% |
| 1413 | CUACACACUCCUGGAUUCC | 84.0% |
| 1420 | UUCGAGUCUGGACGGAUUA | 84.0% |
| 1421 | UCGAGUCUGGACGGAUUAA | 84.0% |
| 1422 | AAGGCUAAUAGAUUUCCUC | 84.0% |
| 1423 | AGAGACAACAUGACCAAGA | 84.0% |
| 1424 | CGAGUCUGGACGGAUUAAG | 84.0% |
| 1425 | ACUACACACUCCUGGAUUC | 84.0% |
| 1426 | AGAGUAAGAGACAACAUGA | 83.9% |
| 1427 | AGCGCAAAAUGCCAUAAGC | 83.9% |
| 1428 | AGUAAGAGACAACAUGACC | 83.9% |
| 1429 | GUAAGAGACAACAUGACCA | 83.9% |
| 1430 | UCAAUGGAUAAAGAGGAAA | 83.9% |
| 1431 | AAGAGACAACAUGACCAAG | 83.9% |
| 1432 | CAAUGGAUAAAGAGGAAAU | 83.9% |
| 1433 | GAGUAAGAGACAACAUGAC | 83.9% |
| 1434 | GCCAAAGGGGAAUUCUUGA | 83.8% |
| 1435 | AGACAACAUGACCAAGAAA | 83.8% |
| 1436 | CUUCGAGUCUGGACGGAUU | 83.8% |
| 1437 | AUGAUUACAUAUAUCACAA | 83.8% |
| 1438 | AGCCAAAGGGGAAUUCUUG | 83.8% |
| 1439 | GGACCAGCAACAGCCCAGA | 83.7% |
| 1440 | GACCAGCAACAGCCCAGAU | 83.7% |
| 1441 | UGAUUACAUAUAUCACAAA | 83.7% |
| 1442 | AUAGAUUUCCUCAAGGAUG | 83.7% |
| 1443 | ACCAGCAACAGCCCAGAUG | 83.7% |
| 1444 | ACAUAUAUCACAAAAAAUC | 83.7% |
| 1445 | UAGAUUUCCUCAAGGAUGU | 83.7% |
| 1446 | CAUAUAUCACAAAAAAUCA | 83.7% |
| 1447 | AUUACAUAUAUCACAAAAA | 83.6% |
| 1448 | GAUUACAUAUAUCACAAAA | 83.6% |
| 1449 | CCAAACUGGCAAAUGUUGU | 83.6% |
| 1450 | AUUGAGAAAAUAAGGCCUC | 83.6% |
| 1451 | UUGAGAAAAUAAGGCCUCU | 83.6% |
| 1452 | AUUGGAGUAACAGUGAUAA | 83.6% |
| 1453 | AGCUUGAACAGUCUGGACU | 83.6% |
| 1454 | GCCAAACUGGCAAAUGUUG | 83.6% |
| 1455 | UUGGAGUAACAGUGAUAAA | 83.6% |
| 1456 | AAGCUUGAACAGUCUGGAC | 83.6% |
| 1457 | GCUAAUAGAUUUCCUCAAG | 83.5% |
| 1458 | AGGAGUGGAUAGAUUCUAC | 83.5% |
| 1459 | CAUGAUAAACAAUGACCUU | 83.5% |
| 1460 | ACCUUGGACCAGCAACAGC | 83.4% |
| 1461 | GACCUUGGACCAGCAACAG | 83.4% |
| 1462 | AAGAAAAUUGAGAAAAUAA | 83.4% |
| 1463 | AGGGCCCGGAUUGAUGCCA | 83.4% |
| 1464 | GGAGUAACAGUGAUAAAGA | 83.4% |
| 1465 | GGGCCCGGAUUGAUGCCAG | 83.4% |
| 1466 | UAGGGCCCGGAUUGAUGCC | 83.4% |
| 1467 | UAUACUGGAGAUCCUCCAU | 83.4% |
| 1468 | AGAAAAUUGAGAAAAUAAG | 83.4% |
| 1469 | GGCCCGGAUUGAUGCCAGA | 83.4% |
| 1470 | AUACUGGAGAUCCUCCAUA | 83.4% |
| 1471 | UUACAUAUAUCACAAAAAA | 83.3% |
| 1472 | CAACAGCCCAGAUGGCUCU | 83.3% |
| 1473 | AGCCAUGGAACAGGAACAG | 83.3% |
| 1474 | GCCAUGGAACAGGAACAGG | 83.3% |
| 1475 | UUAUACUGGAGAUCCUCCA | 83.3% |
| 1476 | CAAACUGGCAAAUGUUGUG | 83.3% |
| 1477 | UACUGGAGAUCCUCCAUAC | 83.3% |
| 1478 | GAGUAACAGUGAUAAAGAA | 83.3% |
| 1479 | CUUAUACUGGAGAUCCUCC | 83.3% |
| 1480 | CCUUAUACUGGAGAUCCUC | 83.3% |
| 1481 | GAAUUGACUUCGAGUCUGG | 83.3% |
| 1482 | AAGAAGUCCUAUAUAAAUA | 83.3% |
| 1483 | GCAACAGCCCAGAUGGCUC | 83.3% |
| 1484 | AUUUGAAUGGAUGUCAAUC | 83.3% |
| 1485 | GCCAGAAUUGACUUCGAGU | 83.2% |
| 1486 | CCAGAAUUGACUUCGAGUC | 83.2% |
| 1487 | CAAAGGGGAAUUCUUGAGG | 83.2% |
| 1488 | CAGAAUUGACUUCGAGUCU | 83.2% |
| 1489 | AAAGGGGAAUUCUUGAGGA | 83.2% |
| 1490 | UCAGCUGAUAUGAGCAUUG | 83.2% |
| 1491 | CCCGGAUUGAUGCCAGAAU | 83.2% |
| 1492 | GAGUGGAUAGAUUCUACAG | 83.2% |
| 1493 | AGUAACAGUGAUAAAGAAC | 83.2% |
| 1494 | UACAUAUAUCACAAAAAAU | 83.2% |
| 1495 | CAGCUGAUAUGAGCAUUGG | 83.2% |
| 1496 | GGAGUGGAUAGAUUCUACA | 83.2% |
| 1497 | AGAAUUGACUUCGAGUCUG | 83.2% |
| 1498 | CGAUGAUUACAUAUAUCAC | 83.1% |
| 1499 | AAGGGGAAUUCUUGAGGAU | 83.1% |
| 1500 | GAUUUCCUCAAGGAUGUGA | 83.1% |
| 1501 | CUGAUAUGAGCAUUGGAGU | 83.1% |
| 1502 | GCUGAUAUGAGCAUUGGAG | 83.1% |
| 1503 | GCCCGGAUUGAUGCCAGAA | 83.1% |
| 1504 | AAUAGAUUUCCUCAAGGAU | 83.0% |
| 1505 | AGGCCAAACUGGCAAAUGU | 83.0% |
| 1506 | UGGAGUAACAGUGAUAAAG | 83.0% |
| 1507 | UGAGCAUUGGAGUAACAGU | 83.0% |
| 1508 | CCGGAUUGAUGCCAGAAUU | 83.0% |
| 1509 | AUGAGCAUUGGAGUAACAG | 83.0% |
| 1510 | AUUUCCUCAAGGAUGUGAU | 83.0% |
| 1511 | GCGAUGAUUACAUAUAUCA | 83.0% |
| 1512 | AAGGCCAAACUGGCAAAUG | 83.0% |
| 1513 | AGCUGAUAUGAGCAUUGGA | 83.0% |
| 1514 | CAUUGGAGUAACAGUGAUA | 82.9% |
| 1515 | AGAUUUCCUCAAGGAUGUG | 82.9% |
| 1516 | AGCAACAGCCCAGAUGGCU | 82.9% |
| 1517 | GGCCAAACUGGCAAAUGUU | 82.9% |
| 1518 | GCAUUGGAGUAACAGUGAU | 82.9% |
| 1519 | AGCAUUGGAGUAACAGUGA | 82.9% |
| 1520 | CCCUUAUACUGGAGAUCCU | 82.9% |
| 1521 | GGAUUGAUGCCAGAAUUGA | 82.7% |
| 1522 | CGGAUUGAUGCCAGAAUUG | 82.7% |
| 1523 | AGAAGGCCAAACUGGCAAA | 82.7% |
| 1524 | GAUGAUUACAUAUAUCACA | 82.7% |
| 1525 | ACAGCCAUGGAACAGGAAC | 82.7% |
| 1526 | AAGAAGGCCAAACUGGCAA | 82.7% |
| 1527 | GAAGGCCAAACUGGCAAAU | 82.7% |
| 1528 | AUAUGAGCAUUGGAGUAAC | 82.7% |
| 1529 | UAUGAGCAUUGGAGUAACA | 82.7% |
| 1530 | UACAGCCAUGGAACAGGAA | 82.7% |
| 1531 | CUUGGACCAGCAACAGCCC | 82.7% |
| 1532 | AUUGAUGCCAGAAUUGACU | 82.7% |
| 1533 | GAGCAUUGGAGUAACAGUG | 82.7% |
| 1534 | UUGGACCAGCAACAGCCCA | 82.7% |
| 1535 | AUGCCAGAAUUGACUUCGA | 82.7% |
| 1536 | UUGAUGCCAGAAUUGACUU | 82.7% |
| 1537 | GAUAUGAGCAUUGGAGUAA | 82.7% |
| 1538 | GAUGCCAGAAUUGACUUCG | 82.7% |
| 1539 | AAUUGACUUCGAGUCUGGA | 82.6% |
| 1540 | UGAUAUGAGCAUUGGAGUA | 82.6% |
| 1541 | AUACAGCCAUGGAACAGGA | 82.6% |
| 1542 | CAGCCAUGGAACAGGAACA | 82.6% |
| 1543 | UGAUGCCAGAAUUGACUUC | 82.5% |
| 1544 | GAUUGAUGCCAGAAUUGAC | 82.5% |
| 1545 | UGGACCAGCAACAGCCCAG | 82.5% |
| 1546 | CUGAAUCUUGGGCAAAAGA | 82.4% |
| 1547 | UGAUGGACCACUACCUGAG | 82.4% |
| 1548 | UGCCAGAAUUGACUUCGAG | 82.4% |
| 1549 | UGGCGAUGAUUACAUAUAU | 82.4% |
| 1550 | GUGGGAGCUAAUGGAUGAG | 82.3% |
| 1551 | GGCGAUGAUUACAUAUAUC | 82.3% |
| 1552 | UAAAGUGGGAGCUAAUGGA | 82.3% |
| 1553 | AAAGUGGGAGCUAAUGGAU | 82.2% |
| 1554 | UUGAAUUCACAAGCUUUUU | 82.0% |
| 1555 | UUUGAAUUCACAAGCUUUU | 82.0% |
| 1556 | AAAAUUGAGAAAAUAAGGC | 81.8% |
| 1557 | CCUUGGACCAGCAACAGCC | 81.8% |
| 1558 | UAAACAAUGACCUUGGACC | 81.8% |
| 1559 | GAUGGACCACUACCUGAGG | 81.8% |
| 1560 | AAAUUGAGAAAAUAAGGCC | 81.8% |
| 1561 | AUUUGAAUUCACAAGCUUU | 81.7% |
| 1562 | CCAAAGGGGAAUUCUUGAG | 81.7% |
| 1563 | CAUUUGAAUUCACAAGCUU | 81.7% |
| 1564 | AUGGACCACUACCUGAGGA | 81.7% |
| 1565 | ACAUUUGAAUUCACAAGCU | 81.7% |
| 1566 | ACACACUCCUGGAUUCCCA | 81.6% |
| 1567 | CACACUCCUGGAUUCCCAA | 81.6% |
| 1568 | ACACUCCUGGAUUCCCAAG | 81.5% |
| 1569 | GAUAAACAAUGACCUUGGA | 81.5% |
| 1570 | AUAUCACAAAAAAUCAACC | 81.5% |
| 1571 | CACUCCUGGAUUCCCAAGA | 81.5% |
| 1572 | GAGGAGACACACAAAUUCA | 81.5% |
| 1573 | ACUCCUGGAUUCCCAAGAG | 81.5% |
| 1574 | AGAUCAUUCGAGCUAAAGA | 81.5% |
| 1575 | UACACACUCCUGGAUUCCC | 81.5% |
| 1576 | AGAGGAGACACACAAAUUC | 81.5% |
| 1577 | UAUAUCACAAAAAAUCAAC | 81.5% |
| 1578 | AUCACAAAAAAUCAACCUG | 81.5% |
| 1579 | AUAUAUCACAAAAAAUCAA | 81.5% |
| 1580 | AUAAACAAUGACCUUGGAC | 81.5% |
| 1581 | UGUUCGAGAAAUUUUUCCC | 81.5% |
| 1582 | AACCCAAUUGAUGGACCAC | 81.5% |
| 1583 | UCACAAAAAAUCAACCUGA | 81.5% |
| 1584 | ACCCAAUUGAUGGACCACU | 81.4% |
| 1585 | CAAACAGACUGUGUCCUGG | 81.4% |
| 1586 | AAACAGACUGUGUCCUGGA | 81.4% |
| 1587 | GAAAAUUGAGAAAAUAAGG | 81.4% |
| 1588 | CAAGCCAAAGGGGAAUUCU | 81.4% |
| 1589 | ACAAACAGACUGUGUCCUG | 81.4% |
| 1590 | ACAAGCCAAAGGGGAAUUC | 81.4% |
| 1591 | CACAAACAGACUGUGUCCU | 81.4% |
| 1592 | AAGCCAAAGGGGAAUUCUU | 81.3% |
| 1593 | CCAAUUGAUGGACCACUAC | 81.3% |
| 1594 | AACAAUGACCUUGGACCAG | 81.3% |
| 1595 | UGGAUUCCCAAGAGGAACC | 81.3% |
| 1596 | GCACAAACAGACUGUGUCC | 81.3% |
| 1597 | ACAAUGACCUUGGACCAGC | 81.3% |
| 1598 | CAAUUGAUGGACCACUACC | 81.3% |
| 1599 | AAACAAUGACCUUGGACCA | 81.3% |
| 1600 | UCCUUGAAGAAUCCCACCC | 81.3% |
| 1601 | UGCACAAACAGACUGUGUC | 81.3% |
| 1602 | UUCCUUGAAGAAUCCCACC | 81.3% |
| 1603 | AAUAAGGCCUCUUCUAAUA | 81.3% |
| 1604 | GGAUUCCCAAGAGGAACCG | 81.3% |
| 1605 | UAUCACAAAAAAUCAACCU | 81.2% |
| 1606 | UUGAAGAAUCCCACCCAGG | 81.2% |
| 1607 | CUUGAAGAAUCCCACCCAG | 81.2% |
| 1608 | CCUGGAUUCCCAAGAGGAA | 81.2% |
| 1609 | ACCACAUUCCCUUAUACUG | 81.2% |
| 1610 | CCCAAUUGAUGGACCACUA | 81.2% |
| 1611 | AAUUGAGAAAAUAAGGCCU | 81.2% |
| 1612 | UCCUGGAUUCCCAAGAGGA | 81.2% |
| 1613 | CCACAUUCCCUUAUACUGG | 81.2% |
| 1614 | CCUUGAAGAAUCCCACCCA | 81.0% |
| 1615 | AACACAAGCCAAAGGGGAA | 81.0% |
| 1616 | AUGACCUUGGACCAGCAAC | 81.0% |
| 1617 | UAAGGCCUCUUCUAAUAGA | 81.0% |
| 1618 | AAUGACCUUGGACCAGCAA | 81.0% |
| 1619 | ACACAAGCCAAAGGGGAAU | 81.0% |
| 1620 | GAUCAUUCGAGCUAAAGAA | 81.0% |
| 1621 | UGACCUUGGACCAGCAACA | 81.0% |
| 1622 | CUCCUGGAUUCCCAAGAGG | 80.9% |
| 1623 | CUGGAUUCCCAAGAGGAAC | 80.9% |
| 1624 | CAAUGACCUUGGACCAGCA | 80.9% |
| 1625 | CACAAGCCAAAGGGGAAUU | 80.9% |
| 1626 | UCAUUCGAGCUAAAGAAGC | 80.8% |
| 1627 | AUAAGGCCUCUUCUAAUAG | 80.8% |
| 1628 | CAUUCGAGCUAAAGAAGCU | 80.8% |
| 1629 | AUCAUUCGAGCUAAAGAAG | 80.8% |
| 1630 | CAAAAUGCCAUAAGCACCA | 80.7% |
| 1631 | AAAUGCCAUAAGCACCACA | 80.6% |
| 1632 | AAAAUGCCAUAAGCACCAC | 80.6% |
| 1633 | GCAAAAUGCCAUAAGCACC | 80.6% |
| 1634 | AUGCCAUAAGCACCACAUU | 80.6% |
| 1635 | AAUGCCAUAAGCACCACAU | 80.6% |
| 1636 | UAAGCACCACAUUCCCUUA | 80.4% |
| 1637 | AUAAGCACCACAUUCCCUU | 80.4% |
| 1638 | UUCAACAUGCUAAGUACGG | 80.3% |
| 1639 | UUCCUCAAGGAUGUGAUGG | 80.3% |
| 1640 | GUUCAACAUGCUAAGUACG | 80.3% |
| 1641 | UUUCCUCAAGGAUGUGAUG | 80.3% |
| 1642 | GAAUCAAUGGAUAAAGAGG | 80.3% |
| 1643 | UCAACAUGCUAAGUACGGU | 80.3% |
| 1644 | CCAAGAGGAACCGCUCUAU | 80.3% |
| 1645 | CUGAGAUCAUGAAGAUCUG | 80.2% |
| 1646 | CCCAAGAGGAACCGCUCUA | 80.2% |
| 1647 | UGCCAUAAGCACCACAUUC | 80.2% |
| 1648 | UCCCAAGAGGAACCGCUCU | 80.2% |
| 1649 | GCCAUAAGCACCACAUUCC | 80.2% |
| 1650 | UUCCCAAGAGGAACCGCUC | 80.2% |
| 1651 | AAUCAAUGGAUAAAGAGGA | 80.2% |
| 1652 | UUAAAGUGGGAGCUAAUGG | 80.2% |
| 1653 | CCAUAAGCACCACAUUCCC | 80.2% |
| 1654 | CAUAAGCACCACAUUCCCU | 80.2% |
| 1655 | AUUCCCAAGAGGAACCGCU | 80.1% |
| 1656 | GAUUCCCAAGAGGAACCGC | 80.1% |
| 1657 | UCCUCAAGGAUGUGAUGGA | 80.0% |
| 1658 | UGAGAAAAUAAGGCCUCUU | 80.0% |
| 1659 | AAGAGGAACCGCUCUAUUC | 80.0% |
| 1660 | GAGACACACAAAUUCAGAC | 80.0% |
| 1661 | CAAGAGGAACCGCUCUAUU | 80.0% |
| 1662 | GGAGACACACAAAUUCAGA | 80.0% |
| 1663 | UGAGAUCAUGAAGAUCUGU | 80.0% |
| 1664 | GAGCUAAAGAAGCUGUGGG | 80.0% |
| 1665 | AGAGGAACCGCUCUAUUCU | 80.0% |
| 1666 | AGCUAAAGAAGCUGUGGGA | 79.9% |
| 1667 | AGAAAAUAAGGCCUCUUCU | 79.9% |
| 1668 | AAAAUAAGGCCUCUUCUAA | 79.9% |
| 1669 | CACAUUCCCUUAUACUGGA | 79.9% |
| 1670 | GAAGUCUGCUUAAAGUGGG | 79.8% |
| 1671 | AAAUAAGGCCUCUUCUAAU | 79.8% |
| 1672 | GAGAAAAUAAGGCCUCUUC | 79.8% |
| 1673 | AGUCUGCUUAAAGUGGGAG | 79.7% |
| 1674 | CCACUACCUGAGGAUAAUG | 79.7% |
| 1675 | AAGUCUGCUUAAAGUGGGA | 79.7% |
| 1676 | AUGUGAUGGAAUCAAUGGA | 79.6% |
| 1677 | GAUGUGAUGGAAUCAAUGG | 79.6% |
| 1678 | GAAAAUAAGGCCUCUUCUA | 79.6% |
| 1679 | CACUACCUGAGGAUAAUGA | 79.6% |
| 1680 | UUCGAGCUAAAGAAGCUGU | 79.4% |
| 1681 | GGACCACUACCUGAGGAUA | 79.4% |
| 1682 | UCGAGCUAAAGAAGCUGUG | 79.4% |
| 1683 | ACCACUACCUGAGGAUAAU | 79.4% |
| 1684 | GACCACUACCUGAGGAUAA | 79.4% |
| 1685 | CGAGCUAAAGAAGCUGUGG | 79.4% |
| 1686 | UCUGCUUAAAGUGGGAGCU | 79.4% |
| 1687 | UGGACCACUACCUGAGGAU | 79.4% |
| 1688 | GUCUGCUUAAAGUGGGAGC | 79.4% |
| 1689 | GAAGCUCCGAACACAAAUA | 79.3% |
| 1690 | AUGAAGCUCCGAACACAAA | 79.3% |
| 1691 | CCAGUUUUGGAGUGUCUGG | 79.3% |
| 1692 | CCCAGUUUUGGAGUGUCUG | 79.3% |
| 1693 | UGAAGCUCCGAACACAAAU | 79.3% |
| 1694 | CAGAAAUGCUAGCAAGCAU | 79.2% |
| 1695 | GUGAUGGAAUCAAUGGAUA | 79.2% |
| 1696 | GCAGAAAUGCUAGCAAGCA | 79.2% |
| 1697 | UGUGAUGGAAUCAAUGGAU | 79.2% |
| 1698 | UGCUUAAAGUGGGAGCUAA | 79.2% |
| 1699 | GGUGGGAUGGGCUCCAAUC | 79.2% |
| 1700 | AAGCUCCGAACACAAAUAC | 79.2% |
| 1701 | UGGUGGGAUGGGCUCCAAU | 79.2% |
| 1702 | GCUUAAAGUGGGAGCUAAU | 79.2% |
| 1703 | AGCUCCGAACACAAAUACC | 79.2% |
| 1704 | CUUAAAGUGGGAGCUAAUG | 79.2% |
| 1705 | UGAUGGAAUCAAUGGAUAA | 79.1% |
| 1706 | CUGCUUAAAGUGGGAGCUA | 79.0% |
| 1707 | UGGAAUCAAUGGAUAAAGA | 79.0% |
| 1708 | AAACAAGGGUGGACAAACU | 78.9% |
| 1709 | GGUUCAGAAACAUCCUGAG | 78.9% |
| 1710 | CAACUCAACCCAAUUGAUG | 78.9% |
| 1711 | UGGUUCAGAAACAUCCUGA | 78.9% |
| 1712 | AACUCAACCCAAUUGAUGG | 78.9% |
| 1713 | AUUCGAGCUAAAGAAGCUG | 78.8% |
| 1714 | CAAACAAGGGUGGACAAAC | 78.8% |
| 1715 | AUCAAUGGAUAAAGAGGAA | 78.8% |
| 1716 | AUGGAAUCAAUGGAUAAAG | 78.8% |
| 1717 | GUUCAGAAACAUCCUGAGC | 78.7% |
| 1718 | CAACAUGCUAAGUACGGUU | 78.7% |
| 1719 | UUCAGAAACAUCCUGAGCA | 78.6% |
| 1720 | GGAAUCAAUGGAUAAAGAG | 78.6% |
| 1721 | UCAGAAACAUCCUGAGCAU | 78.6% |
| 1722 | CAACUGCAUUAGCCAACAC | 78.5% |
| 1723 | GCAACUGCAUUAGCCAACA | 78.5% |
| 1724 | AAGUGGAUAUGCACAAACA | 78.5% |
| 1725 | CAAGUGGAUAUGCACAAAC | 78.5% |
| 1726 | CCAAGUGGAUAUGCACAAA | 78.5% |
| 1727 | AGAAACAUCCUGAGCAUCG | 78.3% |
| 1728 | ACAUGCUAAGUACGGUUUU | 78.3% |
| 1729 | GAAACAUCCUGAGCAUCGC | 78.3% |
| 1730 | AACAUGCUAAGUACGGUUU | 78.3% |
| 1731 | ACACACAAAUUCAGACGAG | 78.2% |
| 1732 | GCACCACAUUCCCUUAUAC | 78.2% |
| 1733 | GCUAAUUUUAGCAUGGAGC | 78.2% |
| 1734 | ACAUCCUGAGCAUCGCACC | 78.2% |
| 1735 | AAUUGAUGGACCACUACCU | 78.2% |
| 1736 | CAGAAACAUCCUGAGCAUC | 78.2% |
| 1737 | AGCACCACAUUCCCUUAUA | 78.2% |
| 1738 | GACACACAAAUUCAGACGA | 78.2% |
| 1739 | AACAUCCUGAGCAUCGCAC | 78.2% |
| 1740 | AAGCACCACAUUCCCUUAU | 78.2% |
| 1741 | CUAAUUUUAGCAUGGAGCU | 78.2% |
| 1742 | AAACAUCCUGAGCAUCGCA | 78.1% |
| 1743 | CACCACAUUCCCUUAUACU | 78.0% |
| 1744 | GAUGGAAUCAAUGGAUAAA | 78.0% |
| 1745 | AGACACACAAAUUCAGACG | 78.0% |
| 1746 | AAGGAUGUGAUGGAAUCAA | 77.7% |
| 1747 | AGGAUGUGAUGGAAUCAAU | 77.7% |
| 1748 | UGGGAUGGGCUCCAAUCCU | 77.6% |
| 1749 | AUGCCGUUGCAACUACACA | 77.6% |
| 1750 | UGAUGCCGUUGCAACUACA | 77.6% |
| 1751 | GUGGGAUGGGCUCCAAUCC | 77.6% |
| 1752 | GAUGCCGUUGCAACUACAC | 77.6% |
| 1753 | AUGAUGCCGUUGCAACUAC | 77.6% |
| 1754 | UAUGAUGCCGUUGCAACUA | 77.6% |
| 1755 | GGGAUGGGCUCCAAUCCUC | 77.6% |
| 1756 | AAUGGAUGUCAAUCCGACU | 77.5% |
| 1757 | GGAUGUGAUGGAAUCAAUG | 77.5% |
| 1758 | GAUUUGUGGCUAAUUUUAG | 77.5% |
| 1759 | GGAUUUGUGGCUAAUUUUA | 77.5% |
| 1760 | GGCACAGCAUCAUUGAGCC | 77.3% |
| 1761 | GUGGCUAAUUUUAGCAUGG | 77.3% |
| 1762 | UUUGUGGCUAAUUUUAGCA | 77.3% |
| 1763 | GCACAGCAUCAUUGAGCCC | 77.3% |
| 1764 | UGGCUAAUUUUAGCAUGGA | 77.3% |
| 1765 | GGCUAAUUUUAGCAUGGAG | 77.3% |
| 1766 | UGGAUUUGUGGCUAAUUUU | 77.3% |
| 1767 | UAUGGAUUUGUGGCUAAUU | 77.3% |
| 1768 | UGUGGCUAAUUUUAGCAUG | 77.3% |
| 1769 | AUGGAUUUGUGGCUAAUUU | 77.3% |
| 1770 | UUGUGGCUAAUUUUAGCAU | 77.3% |
| 1771 | CAAGGAUGUGAUGGAAUCA | 77.2% |
| 1772 | ACUACCUGAGGAUAAUGAG | 77.2% |
| 1773 | CUCAAGGAUGUGAUGGAAU | 77.2% |
| 1774 | GCCCUCAUAGUGAAUGCAC | 77.2% |
| 1775 | CUACCUGAGGAUAAUGAGC | 77.2% |
| 1776 | UCAAGGAUGUGAUGGAAUC | 77.2% |
| 1777 | AUAUGAUGCCGUUGCAACU | 77.1% |
| 1778 | GAAUAUGAUGCCGUUGCAA | 77.1% |
| 1779 | UACCUGAGGAUAAUGAGCC | 77.1% |
| 1780 | AAUAUGAUGCCGUUGCAAC | 77.1% |
| 1781 | CCCUCAUAGUGAAUGCACC | 77.1% |
| 1782 | AUUUGUGGCUAAUUUUAGC | 77.1% |
| 1783 | UGGAAUAUGAUGCCGUUGC | 77.0% |
| 1784 | AGAACACACCAAUAUUCAG | 77.0% |
| 1785 | GGAAUAUGAUGCCGUUGCA | 77.0% |
| 1786 | CAACAAACAAGGGUGGACA | 77.0% |
| 1787 | CCUCAUAGUGAAUGCACCA | 77.0% |
| 1788 | CAGCAUCAUUGAGCCCUGG | 77.0% |
| 1789 | ACAGCAUCAUUGAGCCCUG | 76.9% |
| 1790 | CACAGCAUCAUUGAGCCCU | 76.9% |
| 1791 | AUGGAAUAUGAUGCCGUUG | 76.9% |
| 1792 | AGAAGUCCUAUAUAAAUAA | 76.8% |
| 1793 | CUGUUCCACCAUUGAAGAA | 76.8% |
| 1794 | AAGUACGGUUUUAGGAGUC | 76.8% |
| 1795 | GAACACACCAAUAUUCAGA | 76.8% |
| 1796 | CUCAGACGGCAAAAAUAAU | 76.8% |
| 1797 | AGUACGGUUUUAGGAGUCU | 76.8% |
| 1798 | UGCUAAGUACGGUUUUAGG | 76.8% |
| 1799 | GUACGGUUUUAGGAGUCUC | 76.8% |
| 1800 | CAUGCUAAGUACGGUUUUA | 76.8% |
| 1801 | UAAGUACGGUUUUAGGAGU | 76.8% |
| 1802 | UCCACCAUUGAAGAACUCA | 76.8% |
| 1803 | AGGAGACACACAAAUUCAG | 76.8% |
| 1804 | AUGCUAAGUACGGUUUUAG | 76.8% |
| 1805 | AGGUUCCAGCGCAAAAUGC | 76.7% |
| 1806 | AAGGUUCCAGCGCAAAAUG | 76.7% |
| 1807 | AAAGGUUCCAGCGCAAAAU | 76.7% |
| 1808 | UAAAGGUUCCAGCGCAAAA | 76.7% |
| 1809 | UGUUCCACCAUUGAAGAAC | 76.6% |
| 1810 | GUUCCACCAUUGAAGAACU | 76.6% |
| 1811 | CAUUGAAGAACUCAGACGG | 76.6% |
| 1812 | CUAAGUACGGUUUUAGGAG | 76.6% |
| 1813 | CCAUUGAAGAACUCAGACG | 76.6% |
| 1814 | ACCAUUGAAGAACUCAGAC | 76.6% |
| 1815 | GCUAAGUACGGUUUUAGGA | 76.6% |
| 1816 | UUCCACCAUUGAAGAACUC | 76.6% |
| 1817 | CACCAUUGAAGAACUCAGA | 76.6% |
| 1818 | AUUGAAGAACUCAGACGGC | 76.5% |
| 1819 | GUGGAUAGAUUCUACAGGA | 76.5% |
| 1820 | GGUUCCAGCGCAAAAUGCC | 76.5% |
| 1821 | UUGAAGAACUCAGACGGCA | 76.5% |
| 1822 | GAGCUUUCUUUCACAAUCA | 76.4% |
| 1823 | CUUGAACAGUCUGGACUUC | 76.4% |
| 1824 | CCACCAUUGAAGAACUCAG | 76.4% |
| 1825 | AGUGGAUAGAUUCUACAGG | 76.4% |
| 1826 | AGCUUUCUUUCACAAUCAC | 76.4% |
| 1827 | UUGAACAGUCUGGACUUCC | 76.4% |
| 1828 | UUGCAACACCCGGGAUGCA | 76.3% |
| 1829 | UUCAACAAACAAGGGUGGA | 76.3% |
| 1830 | AUUGCAACACCCGGGAUGC | 76.3% |
| 1831 | AUGUCAAUCCGACUCUACU | 76.3% |
| 1832 | UGCCCUCAUAGUGAAUGCA | 76.1% |
| 1833 | UGGAUGUCAAUCCGACUCU | 76.1% |
| 1834 | UUGCCCUCAUAGUGAAUGC | 76.1% |
| 1835 | GCAACACCCGGGAUGCAAA | 76.1% |
| 1836 | CAACACCCGGGAUGCAAAU | 76.1% |
| 1837 | UGCAACACCCGGGAUGCAA | 76.1% |
| 1838 | UUUGCCCUCAUAGUGAAUG | 76.0% |
| 1839 | AUGGAUGUCAAUCCGACUC | 76.0% |
| 1840 | ACAGAACACACCAAUAUUC | 76.0% |
| 1841 | CAGAACACACCAAUAUUCA | 76.0% |
| 1842 | AACAGAACACACCAAUAUU | 76.0% |
| 1843 | AGGAUGAACAGAUGUACCA | 75.9% |
| 1844 | AUUUUGCCCUCAUAGUGAA | 75.9% |
| 1845 | UGAAGAACUCAGACGGCAA | 75.9% |
| 1846 | GCUUGAACAGUCUGGACUU | 75.9% |
| 1847 | GAAGAACUCAGACGGCAAA | 75.9% |
| 1848 | UGAGGAUGAACAGAUGUAC | 75.9% |
| 1849 | UUUUGCCCUCAUAGUGAAU | 75.9% |
| 1850 | GAUGUCAAUCCGACUCUAC | 75.9% |
| 1851 | GAUUUUGCCCUCAUAGUGA | 75.9% |
| 1852 | GGAUGUCAAUCCGACUCUA | 75.9% |
| 1853 | GAGGAUGAACAGAUGUACC | 75.9% |
| 1854 | UGAGCAAAAAGAAGUCCUA | 75.8% |
| 1855 | AUGAGCAAAAAGAAGUCCU | 75.8% |
| 1856 | AAGAACUCAGACGGCAAAA | 75.8% |
| 1857 | GUUCAACAAACAAGGGUGG | 75.7% |
| 1858 | UCAACAGAACACACCAAUA | 75.7% |
| 1859 | GUCAACAGAACACACCAAU | 75.7% |
| 1860 | CAACAGAACACACCAAUAU | 75.7% |
| 1861 | GCUAUUGCAACACCCGGGA | 75.6% |
| 1862 | UUCACAAGCUUUUUUUAUC | 75.6% |
| 1863 | CUAUUGCAACACCCGGGAU | 75.6% |
| 1864 | AAUUCACAAGCUUUUUUUA | 75.6% |
| 1865 | UGAAUUCACAAGCUUUUUU | 75.6% |
| 1866 | GAAUUCACAAGCUUUUUUU | 75.6% |
| 1867 | UAUUGCAACACCCGGGAUG | 75.6% |
| 1868 | UCACAAGCUUUUUUUAUCG | 75.6% |
| 1869 | GUUCUCAAACAAAAUGGCA | 75.5% |
| 1870 | UUCUCAAACAAAAUGGCAA | 75.5% |
| 1871 | AGAAGGGCUAUUGCAACAC | 75.5% |
| 1872 | GAAGUUUUUAGAUCGAAUG | 75.5% |
| 1873 | UGCCUUGAAACAAUGGAAG | 75.5% |
| 1874 | AGAACUCAGACGGCAAAAA | 75.5% |
| 1875 | AUUCACAAGCUUUUUUUAU | 75.5% |
| 1876 | GAAGGGCUAUUGCAACACC | 75.5% |
| 1877 | UCUCAAACAAAAUGGCAAG | 75.4% |
| 1878 | UACAUGUUCGAGAGUAAGA | 75.3% |
| 1879 | UCUGAGAUCAUGAAGAUCU | 75.3% |
| 1880 | AAGAAGGGCUAUUGCAACA | 75.3% |
| 1881 | ACAUGUUCGAGAGUAAGAG | 75.3% |
| 1882 | GAAAAGGAUACAUGUUCGA | 75.3% |
| 1883 | GGAAAAGGAUACAUGUUCG | 75.3% |
| 1884 | AAAGAAGGGCUAUUGCAAC | 75.2% |
| 1885 | AAAAGAAGGGCUAUUGCAA | 75.2% |
| 1886 | GAACUCAGACGGCAAAAAU | 75.2% |
| 1887 | UCAACAAACAAGGGUGGAC | 75.1% |
| 1888 | CCUGAGUGGUUCAGAAACA | 75.1% |
| 1889 | CAAACAAAAUGGCAAGACU | 75.1% |
| 1890 | CUGAGUGGUUCAGAAACAU | 75.1% |
| 1891 | UCAAACAAAAUGGCAAGAC | 75.0% |
| 1892 | AGAAGUUUUUAGAUCGAAU | 75.0% |
| 1893 | AACUCAGACGGCAAAAAUA | 75.0% |
| 1894 | AUAGAAGUUUUUAGAUCGA | 75.0% |
| 1895 | GGAUACAUGUUCGAGAGUA | 75.0% |
| 1896 | UAGAAGUUUUUAGAUCGAA | 75.0% |
| 1897 | CUCAAACAAAAUGGCAAGA | 75.0% |
| 1898 | AGAAGAUCAUUCGAGCUAA | 75.0% |
| 1899 | AUACAUGUUCGAGAGUAAG | 74.9% |
| 1900 | AUCAACAUGAGCAAAAAGA | 74.9% |
| 1901 | UCAACAUGAGCAAAAAGAA | 74.9% |
| 1902 | AGUGGUUCAGAAACAUCCU | 74.9% |
| 1903 | GAUACAUGUUCGAGAGUAA | 74.9% |
| 1904 | GGAAUCAACAUGAGCAAAA | 74.9% |
| 1905 | GAGUGGUUCAGAAACAUCC | 74.9% |
| 1906 | GUGGUUCAGAAACAUCCUG | 74.9% |
| 1907 | AAAAGAAGUCCUAUAUAAA | 74.8% |
| 1908 | UGAGUGGUUCAGAAACAUC | 74.8% |
| 1909 | GAAUCAACAUGAGCAAAAA | 74.8% |
| 1910 | CCUCAAGGAUGUGAUGGAA | 74.8% |
| 1911 | AAAAAGAAGUCCUAUAUAA | 74.8% |
| 1912 | UAACAACACACUUUCAAAG | 74.7% |
| 1913 | AAUCAACAUGAGCAAAAAG | 74.7% |
| 1914 | UUUCUUUCACAAUCACUGG | 74.7% |
| 1915 | AUAACAACACACUUUCAAA | 74.5% |
| 1916 | UGACAUUGAACACGAUGAC | 74.5% |
| 1917 | GAAGAUCAUUCGAGCUAAA | 74.5% |
| 1918 | ACUCAACCCAAUUGAUGGA | 74.5% |
| 1919 | CACCAUAGAAGUUUUUAGA | 74.5% |
| 1920 | CUCAACCCAAUUGAUGGAC | 74.5% |
| 1921 | UCAACCCAAUUGAUGGACC | 74.5% |
| 1922 | CAACCCAAUUGAUGGACCA | 74.5% |
| 1923 | UUGACAUUGAACACGAUGA | 74.5% |
| 1924 | ACACACUUUCAAAGAAAAA | 74.5% |
| 1925 | UUCUCUGAGAUCAUGAAGA | 74.5% |
| 1926 | ACACCAUAGAAGUUUUUAG | 74.5% |
| 1927 | CACACUUUCAAAGAAAAAG | 74.5% |
| 1928 | AACACCAUAGAAGUUUUUA | 74.5% |
| 1929 | ACCAUAGAAGUUUUUAGAU | 74.5% |
| 1930 | ACAACACACUUUCAAAGAA | 74.4% |
| 1931 | CUCUGAGAUCAUGAAGAUC | 74.4% |
| 1932 | AACAACACACUUUCAAAGA | 74.4% |
| 1933 | GAUAACAACACACUUUCAA | 74.4% |
| 1934 | GAGAUAACAACACACUUUC | 74.4% |
| 1935 | AACACACUUUCAAAGAAAA | 74.4% |
| 1936 | UCUCUGAGAUCAUGAAGAU | 74.4% |
| 1937 | UGCCAGCCCAUGGUCCAGC | 74.4% |
| 1938 | ACGAGAAGAUCAUUCGAGC | 74.4% |
| 1939 | CGAGAAGAUCAUUCGAGCU | 74.4% |
| 1940 | AGAUAACAACACACUUUCA | 74.4% |
| 1941 | CAACACACUUUCAAAGAAA | 74.4% |
| 1942 | CCAUAGAAGUUUUUAGAUC | 74.4% |
| 1943 | GCCAGCCCAUGGUCCAGCC | 74.3% |
| 1944 | AAACUGGGGCACCCCAACU | 74.3% |
| 1945 | CAGAAACUGGGGCACCCCA | 74.3% |
| 1946 | AGAAACUGGGGCACCCCAA | 74.3% |
| 1947 | ACAGAAACUGGGGCACCCC | 74.3% |
| 1948 | AAAGAAGUCCUAUAUAAAU | 74.3% |
| 1949 | CGAUGACCAAAGAUGCAGA | 74.3% |
| 1950 | ACGAUGACCAAAGAUGCAG | 74.3% |
| 1951 | GAAACUGGGGCACCCCAAC | 74.3% |
| 1952 | CCAGCCCAUGGUCCAGCCA | 74.3% |
| 1953 | GAGAAGAUCAUUCGAGCUA | 74.3% |
| 1954 | AGGAUACAUGUUCGAGAGU | 74.2% |
| 1955 | GCCUUGAAACAAUGGAAGU | 74.2% |
| 1956 | AAGGAUACAUGUUCGAGAG | 74.2% |
| 1957 | AUAAUGAGCCAAGUGGAUA | 74.2% |
| 1958 | AAAGGAUACAUGUUCGAGA | 74.2% |
| 1959 | GUAAGAGAAUGAAGCUCCG | 74.1% |
| 1960 | ACAUGAGCAAAAAGAAGUC | 74.1% |
| 1961 | CCGUUGCAACUACACACUC | 74.1% |
| 1962 | GAGCCAAGUGGAUAUGCAC | 74.1% |
| 1963 | AAGUUUUUAGAUCGAAUGG | 74.1% |
| 1964 | CUGGGGCACCCCAACUCAA | 74.1% |
| 1965 | AACUGGGGCACCCCAACUC | 74.1% |
| 1966 | AUGAGCCAAGUGGAUAUGC | 74.1% |
| 1967 | AACAUGAGCAAAAAGAAGU | 74.1% |
| 1968 | CAGUCAACAGAACACACCA | 74.1% |
| 1969 | UUUCAAAGAAAAAGGAGAG | 74.1% |
| 1970 | UGAGCCAAGUGGAUAUGCA | 74.1% |
| 1971 | UGGGAUCAAACCCAAUCAA | 74.1% |
| 1972 | ACUGGGGCACCCCAACUCA | 74.1% |
| 1973 | GCCGUUGCAACUACACACU | 74.1% |
| 1974 | AGCCAAGUGGAUAUGCACA | 74.1% |
| 1975 | GCCAAGUGGAUAUGCACAA | 74.1% |
| 1976 | AGUAAGAGAAUGAAGCUCC | 74.1% |
| 1977 | UUCAAAGAAAAAGGAGAGU | 74.1% |
| 1978 | ACAGUCAACAGAACACACC | 74.1% |
| 1979 | GCUUUCUUUCACAAUCACU | 74.0% |
| 1980 | UGGGAAUCAACAUGAGCAA | 74.0% |
| 1981 | UCAAAGAAAAAGGAGAGUA | 74.0% |
| 1982 | AAUGAGCCAAGUGGAUAUG | 74.0% |
| 1983 | GGGGCACCCCAACUCAACC | 74.0% |
| 1984 | ACAGACUGUGUCCUGGAGG | 74.0% |
| 1985 | CAACAUGAGCAAAAAGAAG | 74.0% |
| 1986 | UCAAAGACUACAGAUAUAC | 74.0% |
| 1987 | GGGCACCCCAACUCAACCC | 74.0% |
| 1988 | UAAUGAGCCAAGUGGAUAU | 74.0% |
| 1989 | CUUUCUUUCACAAUCACUG | 74.0% |
| 1990 | UGGGGCACCCCAACUCAAC | 74.0% |
| 1991 | GUGGGAAUCAACAUGAGCA | 74.0% |
| 1992 | CAGACUGUGUCCUGGAGGC | 74.0% |
| 1993 | CGUUGCAACUACACACUCC | 73.9% |
| 1994 | CACAGUCAACAGAACACAC | 73.9% |
| 1995 | ACACGAUGACCAAAGAUGC | 73.9% |
| 1996 | AGUCAACAGAACACACCAA | 73.9% |
| 1997 | AACACGAUGACCAAAGAUG | 73.9% |
| 1998 | AUGCCAGCCCAUGGUCCAG | 73.9% |
| 1999 | AAAGAAAAAGGAGAGUAAG | 73.9% |
| 2000 | CAAAGAAAAAGGAGAGUAA | 73.9% |
| 2001 | AACAGACUGUGUCCUGGAG | 73.9% |
| 2002 | UAAAAAGAAGGGCUAUUGC | 73.8% |
| 2003 | CACGAUGACCAAAGAUGCA | 73.8% |
| 2004 | UGCCGUUGCAACUACACAC | 73.8% |
| 2005 | AAAUUAAAAAGAAGGGCUA | 73.8% |
| 2006 | AAUUAAAAAGAAGGGCUAU | 73.8% |
| 2007 | AAAAAGAAGGGCUAUUGCA | 73.8% |
| 2008 | UUAAAAAGAAGGGCUAUUG | 73.8% |
| 2009 | AUUAAAAAGAAGGGCUAUU | 73.7% |
| 2010 | GAACACGAUGACCAAAGAU | 73.7% |
| 2011 | UGAACACGAUGACCAAAGA | 73.7% |
| 2012 | GACAUUGAACACGAUGACC | 73.6% |
| 2013 | GAUAAUGAGCCAAGUGGAU | 73.6% |
| 2014 | CAUUGAACACGAUGACCAA | 73.6% |
| 2015 | ACAUUGAACACGAUGACCA | 73.6% |
| 2016 | UUUGAGAACUCAUGCCUUG | 73.6% |
| 2017 | UUGAGAACUCAUGCCUUGA | 73.6% |
| 2018 | CAUAGAAGUUUUUAGAUCG | 73.6% |
| 2019 | CAGCCCAUGGUCCAGCCAA | 73.6% |
| 2020 | AGAAUGAAGCUCCGAACAC | 73.5% |
| 2021 | AAUGAAGCUCCGAACACAA | 73.5% |
| 2022 | GAAUGAAGCUCCGAACACA | 73.5% |
| 2023 | UAGCCAACACCAUAGAAGU | 73.4% |
| 2024 | AACCUGAGUGGUUCAGAAA | 73.4% |
| 2025 | GCCAACACCAUAGAAGUUU | 73.4% |
| 2026 | CCAACACCAUAGAAGUUUU | 73.4% |
| 2027 | UGAAUCUUGGGCAAAAGAA | 73.4% |
| 2028 | CAACCUGAGUGGUUCAGAA | 73.4% |
| 2029 | CAACACCAUAGAAGUUUUU | 73.4% |
| 2030 | UAGGAAAAGGAUACAUGUU | 73.3% |
| 2031 | GAGAACUCAUGCCUUGAAA | 73.3% |
| 2032 | UCAACCUGAGUGGUUCAGA | 73.3% |
| 2033 | AGCAAAAAGAAGUCCUAUA | 73.3% |
| 2034 | AGCCAACACCAUAGAAGUU | 73.3% |
| 2035 | GAGCAAAAAGAAGUCCUAU | 73.3% |
| 2036 | GCAAAAAGAAGUCCUAUAU | 73.3% |
| 2037 | AGAACUCAUGCCUUGAAAC | 73.3% |
| 2038 | UCAUCAAAGACUACAGAUA | 73.2% |
| 2039 | UGAGAACUCAUGCCUUGAA | 73.2% |
| 2040 | UUGGAAUUUCUAGCAUGGU | 73.2% |
| 2041 | UUCAUCAAAGACUACAGAU | 73.2% |
| 2042 | UUAGCCAACACCAUAGAAG | 73.2% |
| 2043 | ACUCAGACGGCAAAAAUAA | 73.1% |
| 2044 | UUGAACACGAUGACCAAAG | 73.1% |
| 2045 | AAAAGAAAUACACCAAGAC | 73.1% |
| 2046 | CUAAAGGUUCCAGCGCAAA | 73.1% |
| 2047 | AAUCAACCUGAGUGGUUCA | 73.1% |
| 2048 | AUCAACCUGAGUGGUUCAG | 73.1% |
| 2049 | ACAAAAUGGCAAGACUAGG | 73.1% |
| 2050 | AAAAAUCAACCUGAGUGGU | 73.1% |
| 2051 | CAAAAAGAAGUCCUAUAUA | 73.1% |
| 2052 | UCUAGCAUGGUGGAGGCCA | 72.9% |
| 2053 | AAAAUCAACCUGAGUGGUU | 72.9% |
| 2054 | AUUUCUAGCAUGGUGGAGG | 72.9% |
| 2055 | UAGCAUGGUGGAGGCCAUG | 72.9% |
| 2056 | AAAUCAACCUGAGUGGUUC | 72.9% |
| 2057 | AUUGAAGACGAUGACCAAA | 72.9% |
| 2058 | CUAGCAUGGUGGAGGCCAU | 72.9% |
| 2059 | ACCUGAGUGGUUGAGAAAC | 72.9% |
| 2060 | CAAAAGAAAUACACCAAGA | 72.9% |
| 2061 | UUUCUAGCAUGGUGGAGGC | 72.9% |
| 2062 | AGGAAAAGGAUACAUGUUC | 72.8% |
| 2063 | AAAAGCUUGAACAGUCUGG | 72.8% |
| 2064 | GGAAUUUCUAGCAUGGUGG | 72.8% |
| 2065 | ACAAAAAAUCAACCUGAGU | 72.8% |
| 2066 | AAAAAAUCAACCUGAGUGG | 72.8% |
| 2067 | AAGAAAUACACCAAGACAA | 72.8% |
| 2068 | AACAAAAUGGCAAGACUAG | 72.8% |
| 2069 | CAAAAAAUCAACCUGAGUG | 72.8% |
| 2070 | AGAAAUACACCAAGACAAC | 72.8% |
| 2071 | AAGAAAAAACAAAGAGUGA | 72.8% |
| 2072 | AAAGCUUGAACAGUCUGGA | 72.8% |
| 2073 | UGGAAUUUCUAGCAUGGUG | 72.8% |
| 2074 | AAUUUCUAGCAUGGUGGAG | 72.8% |
| 2075 | GAAAAGCUUGAACAGUCUG | 72.8% |
| 2076 | GAAUUUCUAGCAUGGUGGA | 72.8% |
| 2077 | UUCUAGCAUGGUGGAGGCC | 72.8% |
| 2078 | AAAGACUACAGAUAUACAU | 72.7% |
| 2079 | GGGCAAAAGAAAUACACCA | 72.7% |
| 2080 | AAUACACCAAGACAACAUA | 72.7% |
| 2081 | AAAGAAAUACACCAAGACA | 72.7% |
| 2082 | UCCUAAAGGUUCCAGCGCA | 72.7% |
| 2083 | UAAGAGAAUGAAGCUCCGA | 72.7% |
| 2084 | AAGAGAAUGAAGCUCCGAA | 72.7% |
| 2085 | UUUGCGAAAAGCUUGAACA | 72.7% |
| 2086 | CCUAAAGGUUCCAGCGCAA | 72.7% |
| 2087 | AUUUGCGAAAAGCUUGAAC | 72.7% |
| 2088 | AGAGAAUGAAGCUCCGAAC | 72.7% |
| 2089 | UUCCUAAAGGUUCCAGCGC | 72.7% |
| 2090 | AAGACUACAGAUAUACAUA | 72.7% |
| 2091 | CACAAAAAAUCAACCUGAG | 72.7% |
| 2092 | AAAUACACCAAGACAACAU | 72.7% |
| 2093 | CAUUUGCGAAAAGCUUGAA | 72.7% |
| 2094 | CAAAGACUACAGAUAUACA | 72.6% |
| 2095 | CCAAUAAUGUUCUCAAACA | 72.6% |
| 2096 | GAGAAUGAAGCUCCGAACA | 72.6% |
| 2097 | GAAAUACACCAAGACAACA | 72.6% |
| 2098 | AACAAACAAGGGUGGACAA | 72.6% |
| 2099 | AAACAAAAUGGCAAGACUA | 72.6% |
| 2100 | UCUUUGAGAACUCAUGCCU | 72.6% |
| 2101 | UCCUAUAUAAAUAAAACAG | 72.6% |
| 2102 | CCUAUAUAAAUAAAACAGG | 72.6% |
| 2103 | CAAUAAUGUUCUCAAACAA | 72.6% |
| 2104 | UUCGAGAGUAAGAGAAUGA | 72.6% |
| 2105 | GUUCGAGAGUAAGAGAAUG | 72.6% |
| 2106 | UGGGCAAAAGAAAUACACC | 72.6% |
| 2107 | CUUGGGCAAAAGAAAUACA | 72.6% |
| 2108 | UCGAGAGUAAGAGAAUGAA | 72.6% |
| 2109 | AUGUUCGAGAGUAAGAGAA | 72.6% |
| 2110 | AAUAAUGUUCUCAAACAAA | 72.6% |
| 2111 | UUGGGCAAAAGAAAUACAC | 72.6% |
| 2112 | UGUUCGAGAGUAAGAGAAU | 72.6% |
| 2113 | ACAAACAAGGGUGGACAAA | 72.5% |
| 2114 | ACUCAUGCCUUGAAACAAU | 72.5% |
| 2115 | GAAAAAGGAGAGUAAGAGA | 72.5% |
| 2116 | AAAAGGAGAGUAAGAGACA | 72.5% |
| 2117 | GAAUCUUGGGCAAAAGAAA | 72.5% |
| 2118 | CUAGGAAAAGGAUACAUGU | 72.5% |
| 2119 | AGCAUUUGCGAAAAGCUUG | 72.5% |
| 2120 | AUCUUUGAGAACUCAUGCC | 72.5% |
| 2121 | AAAGGAGAGUAAGAGACAA | 72.5% |
| 2122 | GCAUUUGCGAAAAGCUUGA | 72.5% |
| 2123 | AUCUUGGGCAAAAGAAAUA | 72.4% |
| 2124 | GCGAAAAGCUUGAACAGUC | 72.4% |
| 2125 | UGUUCAUCAAAGACUACAG | 72.4% |
| 2126 | AAUCUUGGGCAAAAGAAAU | 72.4% |
| 2127 | AGUUUUGGAGUGUCUGGAA | 72.4% |
| 2128 | GAGCUUUGACAUUGAACAC | 72.4% |
| 2129 | AGAAAAAGGAGAGUAAGAG | 72.4% |
| 2130 | CAAUUGUUCAUCAAAGACU | 72.4% |
| 2131 | AAUUGUUCAUCAAAGACUA | 72.4% |
| 2132 | UCUUGGGCAAAAGAAAUAC | 72.4% |
| 2133 | AACUCAUGCCUUGAAACAA | 72.4% |
| 2134 | AGAAAAAACAAAGAGUGAA | 72.4% |
| 2135 | UGCGAAAAGCUUGAACAGU | 72.4% |
| 2136 | AGACUACAGAUAUACAUAU | 72.4% |
| 2137 | UUGCGAAAAGCUUGAACAG | 72.4% |
| 2138 | CGAAAAGCUUGAACAGUCU | 72.4% |
| 2139 | AAGAAAAAGGAGAGUAAGA | 72.4% |
| 2140 | GAGUGAAUAAGAGAGGCUA | 72.3% |
| 2141 | GGCAAAAGAAAUACACCAA | 72.3% |
| 2142 | CAUGUUCGAGAGUAAGAGA | 72.3% |
| 2143 | AAAAAACAAAGAGUGAAUA | 72.3% |
| 2144 | AGAGUGAAUAAGAGAGGCU | 72.3% |
| 2145 | GAAAAAACAAAGAGUGAAU | 72.3% |
| 2146 | CUGUGGGAUCAAACCCAAU | 72.2% |
| 2147 | GGGAAUCAACAUGAGCAAA | 72.2% |
| 2148 | GUGUCCUGGAGGCUAUGGC | 72.2% |
| 2149 | AAAAAGGAGAGUAAGAGAC | 72.2% |
| 2150 | UCUGUAAACAAUGCUGUAG | 72.2% |
| 2151 | GUGGGAUCAAACCCAAUCA | 72.2% |
| 2152 | AAGAUCAUUCGAGCUAAAG | 72.2% |
| 2153 | UGUGUCCUGGAGGCUAUGG | 72.2% |
| 2154 | UGUGGGAUCAAACCCAAUC | 72.2% |
| 2155 | CUGUAAACAAUGCUGUAGU | 72.2% |
| 2156 | GAACUCAUGCCUUGAAACA | 72.2% |
| 2157 | GUUUUGGAGUGUCUGGAAU | 72.2% |
| 2158 | CAUGAGCAAAAAGAAGUCC | 72.1% |
| 2159 | GGAUGAUGAUGGGCAUGUU | 72.1% |
| 2160 | AACAAAGAGUGAAUAAGAG | 72.1% |
| 2161 | ACAAAGAGUGAAUAAGAGA | 72.1% |
| 2162 | AAACAAAGAGUGAAUAAGA | 72.1% |
| 2163 | GGGAUGAUGAUGGGCAUGU | 72.1% |
| 2164 | AAAAGGAUACAUGUUCGAG | 72.1% |
| 2165 | ACUAGGAAAAGGAUACAUG | 72.1% |
| 2166 | CUUUGAGAACUCAUGCCUU | 72.0% |
| 2167 | AGACUGUGUCCUGGAGGCU | 72.0% |
| 2168 | GACUAGGAAAAGGAUACAU | 72.0% |
| 2169 | CCCAACUCAACCCAAUUGA | 72.0% |
| 2170 | AAAAACAAAGAGUGAAUAA | 72.0% |
| 2171 | UUGUUCGAGAAAUUUUUCC | 72.0% |
| 2172 | AGUCCUAUAUAAAUAAAAC | 72.0% |
| 2173 | AACUUGUUCGAGAAAUUUU | 72.0% |
| 2174 | CCCCAACUCAACCCAAUUG | 72.0% |
| 2175 | AAGUCCUAUAUAAAUAAAA | 72.0% |
| 2176 | ACUGUGUCCUGGAGGCUAU | 72.0% |
| 2177 | CUGUGUCCUGGAGGCUAUG | 72.0% |
| 2178 | AACACUAAGUGGAAUGAAA | 72.0% |
| 2179 | AGGAGAGUAAGAGACAACA | 72.0% |
| 2180 | UGCAACUUGUUCGAGAAAU | 72.0% |
| 2181 | ACACUAAGUGGAAUGAAAA | 72.0% |
| 2182 | UGCUGCAACUUGUUCGAGA | 72.0% |
| 2183 | GCUGUGGGAUCAAACCCAA | 72.0% |
| 2184 | CCAACUCAACCCAAUUGAU | 72.0% |
| 2185 | GACUGUGUCCUGGAGGCUA | 72.0% |
| 2186 | ACUUGUUCGAGAAAUUUUU | 72.0% |
| 2187 | AAGGAGAGUAAGAGACAAC | 72.0% |
| 2188 | AGACUAGGAAAAGGAUACA | 72.0% |
| 2189 | GCAACUUGUUCGAGAAAUU | 72.0% |
| 2190 | GGAGAGUAAGAGACAACAU | 72.0% |
| 2191 | GUCCUAUAUAAAUAAAACA | 71.9% |
| 2192 | CUAAUAAGAGCUUUGACAU | 71.9% |
| 2193 | CAACUUGUUCGAGAAAUUU | 71.9% |
| 2194 | AAAAUGGCAAGACUAGGAA | 71.9% |
| 2195 | CUGGACGGAUUAAGAAGGA | 71.9% |
| 2196 | GAAGUCCUAUAUAAAUAAA | 71.9% |
| 2197 | UAAUAAGAGCUUUGACAUU | 71.9% |
| 2198 | CAAAGAGUGAAUAAGAGAG | 71.9% |
| 2199 | CUUGUUCGAGAAAUUUUUC | 71.9% |
| 2200 | GCUGCAACUUGUUCGAGAA | 71.9% |
| 2201 | UCAUGCCUUGAAACAAUGG | 71.9% |
| 2202 | CAUGCCUUGAAACAAUGGA | 71.9% |
| 2203 | AAAUGGCAAGACUAGGAAA | 71.9% |
| 2204 | CAAAAUGGCAAGACUAGGA | 71.9% |
| 2205 | UCUGGACGGAUUAAGAAGG | 71.9% |
| 2206 | AAAGAGUGAAUAAGAGAGG | 71.9% |
| 2207 | ACAGGAACAGGGUACACCA | 71.8% |
| 2208 | CACUUUCAAAGAAAAAGGA | 71.8% |
| 2209 | CAACACUAAGUGGAAUGAA | 71.8% |
| 2210 | GACAACACUAAGUGGAAUG | 71.8% |
| 2211 | ACAACACUAAGUGGAAUGA | 71.8% |
| 2212 | UGGACGGAUUAAGAAGGAA | 71.8% |
| 2213 | ACACUUUCAAAGAAAAAGG | 71.8% |
| 2214 | AAAACAAAGAGUGAAUAAG | 71.8% |
| 2215 | CAGGAACAGGGUACACCAU | 71.8% |
| 2216 | UAUGGAAUAUGAUGCCGUU | 71.8% |
| 2217 | ACUUUCAAAGAAAAAGGAG | 71.8% |
| 2218 | GAGUCAGCUGAUAUGAGCA | 71.7% |
| 2219 | AGAGCUUUGACAUUGAACA | 71.7% |
| 2220 | AUAAGAGCUUUGACAUUGA | 71.7% |
| 2221 | GGACGGAUUAAGAAGGAAG | 71.7% |
| 2222 | GAGAGUAAGAGACAACAUG | 71.7% |
| 2223 | AAGAGCUUUGACAUUGAAC | 71.7% |
| 2224 | GUCUGGACGGAUUAAGAAG | 71.7% |
| 2225 | GAUGGGCUCCAAUCCUCCG | 71.7% |
| 2226 | AAGCUGUGGGAUCAAACCC | 71.7% |
| 2227 | UAAGAGCUUUGACAUUGAA | 71.7% |
| 2228 | CUUUCAAAGAAAAAGGAGA | 71.7% |
| 2229 | AUGGGCUCCAAUCCUCCGA | 71.7% |
| 2230 | GGAUGGGCUCCAAUCCUCC | 71.7% |
| 2231 | GACGGAUUAAGAAGGAAGA | 71.7% |
| 2232 | AGUCAGCUGAUAUGAGCAU | 71.7% |
| 2233 | ACAAAUACAGAAACUGGGG | 71.6% |
| 2234 | GGAACAGGGUACACCAUGG | 71.6% |
| 2235 | AGCUGUGGGAUCAAACCCA | 71.6% |
| 2236 | CAAAUACAGAAACUGGGGC | 71.6% |
| 2237 | GUCAGCUGAUAUGAGCAUU | 71.6% |
| 2238 | CUGCAACUUGUUCGAGAAA | 71.6% |
| 2239 | GAACAGGGUACACCAUGGA | 71.6% |
| 2240 | AAGAGUGAAUAAGAGAGGC | 71.6% |
| 2241 | AGUGCUGCAACUUGUUCGA | 71.5% |
| 2242 | CUUUCACAAUCACUGGGGA | 71.5% |
| 2243 | CUCAUGCCUUGAAACAAUG | 71.5% |
| 2244 | UCUUUCACAAUCACUGGGG | 71.5% |
| 2245 | AAGUGCUGCAACUUGUUCG | 71.5% |
| 2246 | AGGAACAGGGUACACCAUG | 71.5% |
| 2247 | AUGCCUUGAAACAAUGGAA | 71.4% |
| 2248 | AAUAAGAGCUUUGACAUUG | 71.4% |
| 2249 | CAGUUUUGGAGUGUCUGGA | 71.4% |
| 2250 | AAAGAAGGCCAAACUGGCA | 71.4% |
| 2251 | AUCAAAGACUACAGAUAUA | 71.4% |
| 2252 | CCUUUGUCAGCCAUAAAGA | 71.4% |
| 2253 | GUAUGGAAUAUGAUGCCGU | 71.4% |
| 2254 | UUGGCGAUGAUUACAUAUA | 71.4% |
| 2255 | GAAAAGAAGGCCAAACUGG | 71.4% |
| 2256 | CAUCAAAGACUACAGAUAU | 71.4% |
| 2257 | CCCUUUGUCAGCCAUAAAG | 71.4% |
| 2258 | UUGUUCAUCAAAGACUACA | 71.4% |
| 2259 | AAAAGAAGGCCAAACUGGC | 71.4% |
| 2260 | GCCCAUGGUCCAGCCAAAA | 71.2% |
| 2261 | ACAACAUACUGGUGGGAUG | 71.2% |
| 2262 | GUGCUGCAACUUGUUCGAG | 71.2% |
| 2263 | AGUAUGGAAUAUGAUGCCG | 71.2% |
| 2264 | CAACAUACUGGUGGGAUGG | 71.2% |
| 2265 | AAUCCCUUUGUCAGCCAUA | 71.2% |
| 2266 | UCCCUUUGUCAGCCAUAAA | 71.2% |
| 2267 | AUUGUUCAUCAAAGACUAC | 71.2% |
| 2268 | AUCCCUUUGUCAGCCAUAA | 71.2% |
| 2269 | UGGCAAGACUAGGAAAAGG | 71.1% |
| 2270 | UUCUUUCACAAUCACUGGG | 71.1% |
| 2271 | AAUGGCAAGACUAGGAAAA | 71.1% |
| 2272 | UUUCACAAUCACUGGGGAC | 71.1% |
| 2273 | UCGCACCAAUAAUGUUCUC | 71.1% |
| 2274 | GCACCAAUAAUGUUCUCAA | 71.1% |
| 2275 | ACCAAUAAUGUUCUCAAAC | 71.1% |
| 2276 | UUCACAAUCACUGGGGACA | 71.1% |
| 2277 | UCACAAUCACUGGGGACAA | 71.1% |
| 2278 | CACCAAUAAUGUUCUCAAA | 71.1% |
| 2279 | AUGGCAAGACUAGGAAAAG | 71.1% |
| 2280 | ACUUAUGAUUGGACAUUAA | 71.0% |
| 2281 | GCUUUGACAUUGAACACGA | 71.0% |
| 2282 | GAAGUCGUUCAACAAACAA | 71.0% |
| 2283 | AGCUUUGACAUUGAACACG | 71.0% |
| 2284 | AAGUCGUUCAACAAACAAG | 71.0% |
| 2285 | UAGCUAGAAGCAUUUGCGA | 71.0% |
| 2286 | UUUGACAUUGAACACGAUG | 71.0% |
| 2287 | CUUUGACAUUGAACACGAU | 71.0% |
| 2288 | AUCGCACCAAUAAUGUUCU | 71.0% |
| 2289 | CUUUAGCUAGAAGCAUUUG | 71.0% |
| 2290 | CUUAUGAUUGGACAUUAAA | 71.0% |
| 2291 | GAACACAAAUACCCGCAGA | 71.0% |
| 2292 | AGCAUCGCACCAAUAAUGU | 70.9% |
| 2293 | GCAUCGCACCAAUAAUGUU | 70.9% |
| 2294 | UUCAGACGAGAAGAUCAUU | 70.9% |
| 2295 | UGAGCAUCGCACCAAUAAU | 70.9% |
| 2296 | CGCACCAAUAAUGUUCUCA | 70.9% |
| 2297 | UUAGCUAGAAGCAUUUGCG | 70.9% |
| 2298 | CAUCGCACCAAUAAUGUUC | 70.9% |
| 2299 | GAGCAUCGCACCAAUAAUG | 70.9% |
| 2300 | UCUCGAUACUGAAUCUUGG | 70.8% |
| 2301 | AGACGAGAAGAUCAUUCGA | 70.8% |
| 2302 | GGUAAUGAAAAGAAGGCCA | 70.8% |
| 2303 | CAGACGAGAAGAUCAUUCG | 70.8% |
| 2304 | GUCUCGAUACUGAAUCUUG | 70.8% |
| 2305 | UUUAGCUAGAAGCAUUUGC | 70.8% |
| 2306 | GUAAUGAAAAGAAGGCCAA | 70.8% |
| 2307 | ACUUUAGCUAGAAGCAUUU | 70.8% |
| 2308 | AGCCCAUGGUCCAGCCAAA | 70.8% |
| 2309 | UAAUGAAAAGAAGGCCAAA | 70.7% |
| 2310 | GAGUCUCGAUACUGAAUCU | 70.7% |
| 2311 | UCAGACGAGAAGAUCAUUC | 70.7% |
| 2312 | UCGUUCAACAAACAAGGGU | 70.7% |
| 2313 | AUUCAGACGAGAAGAUCAU | 70.7% |
| 2314 | UGCCAUAGAGGAGACACAC | 70.7% |
| 2315 | CCCAUGGUCCAGCCAAAAG | 70.7% |
| 2316 | GGAGUCUCGAUACUGAAUC | 70.7% |
| 2317 | UGACCAAAGAUGCAGAGAG | 70.6% |
| 2318 | CACAAAUUCAGACGAGAAG | 70.6% |
| 2319 | CUGAGCAUCGCACCAAUAA | 70.6% |
| 2320 | CCAAAGAUGCAGAGAGAGG | 70.6% |
| 2321 | AGUCUCGAUACUGAAUCUU | 70.6% |
| 2322 | CAACAAGGAAGAAAAUUGA | 70.6% |
| 2323 | GCACCCCAACUCAACCCAA | 70.6% |
| 2324 | GCCAUAGAGGAGACACACA | 70.6% |
| 2325 | GGCACCCCAACUCAACCCA | 70.6% |
| 2326 | UAUACAUAUAGGUGCCAUA | 70.6% |
| 2327 | AUGACCAAAGAUGCAGAGA | 70.6% |
| 2328 | GUUGAAACUUUAGCUAGAA | 70.6% |
| 2329 | AUACAUAUAGGUGCCAUAG | 70.6% |
| 2330 | GUCGUUCAACAAACAAGGG | 70.5% |
| 2331 | ACAAAUUCAGACGAGAAGA | 70.5% |
| 2332 | ACAAGGAAGAAAAUUGAGA | 70.5% |
| 2333 | UCCUGAGCAUCGCACCAAU | 70.5% |
| 2334 | AUCCUGAGCAUCGCACCAA | 70.5% |
| 2335 | GGGGACAACACUAAGUGGA | 70.5% |
| 2336 | AUAGAGGAGACACACAAAU | 70.5% |
| 2337 | GGGACAACACUAAGUGGAA | 70.5% |
| 2338 | CCAUAGAGGAGACACACAA | 70.5% |
| 2339 | ACCAAAGAUGCAGAGAGAG | 70.5% |
| 2340 | ACACAAAUUCAGACGAGAA | 70.5% |
| 2341 | UCAACAAGGAAGAAAAUUG | 70.5% |
| 2342 | GACGAGAAGAUCAUUCGAG | 70.5% |
| 2343 | GUUCAUCAAAGACUACAGA | 70.5% |
| 2344 | AAAUUCAGACGAGAAGAUC | 70.5% |
| 2345 | CAUAGAGGAGACACACAAA | 70.5% |
| 2346 | CAAAUUCAGACGAGAAGAU | 70.5% |
| 2347 | GGACAACACUAAGUGGAAU | 70.5% |
| 2348 | AAUUCAGACGAGAAGAUCA | 70.5% |
| 2349 | GACCAAAGAUGCAGAGAGA | 70.5% |
| 2350 | AACUUUAGCUAGAAGCAUU | 70.4% |
| 2351 | AUGAAAAGAAGGCCAAACU | 70.4% |
| 2352 | CACCCCAACUCAACCGAAU | 70.4% |
| 2353 | UACUGAAUCUUGGGCAAAA | 70.4% |
| 2354 | ACCCCAACUCAACCCAAUU | 70.4% |
| 2355 | AAUGAAAAGAAGGCCAAAC | 70.4% |
| 2356 | UGAAACUUUAGCUAGAAGC | 70.4% |
| 2357 | UUGAAACUUUAGCUAGAAG | 70.4% |
| 2358 | AACAAGGAAGAAAAUUGAG | 70.4% |
| 2359 | GAAACUUUAGCUAGAAGCA | 70.4% |
| 2360 | UAGAGGAGACACACAAAUU | 70.4% |
| 2361 | AAACUUUAGCUAGAAGCAU | 70.4% |
| 2362 | CCUGAGCAUCGCACCAAUA | 70.3% |
| 2363 | AUCAACAAGGAAGAAAAUU | 70.3% |
| 2364 | AUACUGAAUCUUGGGCAAA | 70.3% |
| 2365 | CGAACACAAAUACCCGCAG | 70.3% |
| 2366 | AAUCAACAAGGAAGAAAAU | 70.3% |
| 2367 | ACAAAUACCCGCAGAAAUG | 70.2% |
| 2368 | AGAAGCUGUGGGAUCAAAC | 70.2% |
| 2369 | ACUGAAUCUUGGGCAAAAG | 70.2% |
| 2370 | ACACAAAUACCCGCAGAAA | 70.2% |
| 2371 | GAAUCAACAAGGAAGAAAA | 70.2% |
| 2372 | AAGAAGCUGUGGGAUCAAA | 70.2% |
| 2373 | CACAAAUACCCGCAGAAAU | 70.2% |
| 2374 | UGAAAAGAAGGCCAAACUG | 70.2% |
| 2375 | UAAAGAAGCUGUGGGAUCA | 70.1% |
| 2376 | AAAGAAGCUGUGGGAUCAA | 70.1% |
| 2377 | CACACAAAUUCAGACGAGA | 70.1% |
| 2378 | CAAAUACCCGCAGAAAUGC | 70.1% |
| 2379 | UUGGAGUGUCUGGAAUAAA | 70.1% |
| 2380 | UAUUUCAAUGAAUCAACAA | 70.1% |
| 2381 | UUUGGAGUGUCUGGAAUAA | 70.1% |
| 2382 | AAAUACCCGCAGAAAUGCU | 70.1% |
| 2383 | AACACAAAUACCCGCAGAA | 70.1% |
| 2384 | CAUCCUGAGCAUCGCACCA | 70.1% |
| 2385 | AAAUACAGAAACUGGGGCA | 70.0% |
| 2386 | CUGCAUUAGCCAACACCAU | 70.0% |
| 2387 | ACUGCAUUAGCCAACACCA | 70.0% |
| 2388 | AAUACAGAAACUGGGGCAC | 70.0% |
| 2389 | AGUCGUUCAACAAACAAGG | 70.0% |

TABLE 2-3

Conserved 19-mer sequences that are present in
at least 70% of the Influenza A segment 2 (PA)
sequences listed in Table 1-3.

| | | |
|---|---|---|
| Seq ID | Sequence | Percent |

| | | |
|---|---|---|
| 2390 | UUAGAGCCUAUGUGGAUGG | 98.9% |
| 2391 | UUUAGAGCCUAUGUGGAUG | 98.9% |
| 2392 | AGCAAUUGAGGAGUGCCUG | 98.7% |
| 2393 | UUGAGGAGUGCCUGAUUAA | 98.7% |
| 2394 | GCAAUUGAGGAGUGCCUGA | 98.6% |
| 2395 | AUUGAGGAGUGCCUGAUUA | 98.6% |
| 2396 | CAAUUGAGGAGUGCCUGAU | 98.6% |
| 2397 | AAUUGAGGAGUGCCUGAUU | 98.6% |
| 2398 | UAGAGCCUAUGUGGAUGGA | 98.3% |
| 2399 | AGAGCCUAUGUGGAUGGAU | 98.3% |
| 2400 | GAGCCUAUGUGGAUGGAUU | 98.2% |
| 2401 | UAAUGAUCCCUGGGUUUUG | 98.0% |
| 2402 | UUAAUGAUCCCUGGGUUUU | 98.0% |
| 2403 | AUGAUCCCUGGGUUUUGCU | 98.0% |
| 2404 | AAUGAUCCCUGGGUUUUGC | 98.0% |
| 2405 | CCUGAUUAAUGAUCCCUGG | 97.9% |
| 2406 | UGCCUGAUUAAUGAUCCCU | 97.9% |
| 2407 | AUUAAUGAUCCCUGGGUUU | 97.9% |
| 2408 | GCCUGAUUAAUGAUCCCUG | 97.9% |
| 2409 | CUGAUUAAUGAUCCCUGGG | 97.9% |
| 2410 | GAUUAAUGAUCCCUGGGUU | 97.8% |
| 2411 | UGAUUAAUGAUCCCUGGGU | 97.8% |
| 2412 | UAUAUGAAGCAAUUGAGGA | 97.3% |
| 2413 | CUAUAUGAAGCAAUUGAGG | 97.2% |
| 2414 | CUUGGUUCAACUCCUUCCU | 97.1% |
| 2415 | UCUUGGUUCAACUCCUUCC | 97.1% |
| 2416 | AGGAGUGCCUGAUUAAUGA | 96.9% |
| 2417 | GAGUGCCUGAUUAAUGAUC | 96.9% |
| 2418 | UGAGGAGUGCCUGAUUAAU | 96.9% |
| 2419 | GUGCCUGAUUAAUGAUCCC | 96.9% |
| 2420 | GGAGUGCCUGAUUAAUGAU | 96.9% |
| 2421 | GAGGAGUGCCUGAUUAAUG | 96.9% |
| 2422 | AGUGCCUGAUUAAUGAUCC | 96.9% |
| 2423 | UAUGAAGCAAUUGAGGAGU | 96.4% |
| 2424 | AUAUGAAGCAAUUGAGGAG | 96.4% |
| 2425 | AUGAAGCAAUUGAGGAGUG | 96.4% |
| 2426 | UGAAGCAAUUGAGGAGUGC | 96.4% |
| 2427 | AAGCAAUUGAGGAGUGCCU | 96.4% |
| 2428 | GAAGCAAUUGAGGAGUGCC | 96.4% |
| 2429 | ACAAAUUUGCAGCAAUAUG | 95.4% |
| 2430 | AACAAAUUUGCAGCAAUAU | 95.4% |
| 2431 | GGGCUAUAUGAAGCAAUUG | 95.3% |
| 2432 | GCUAUAUGAAGCAAUUGAG | 95.3% |
| 2433 | UCAUGUAUUCAGAUUUUCA | 95.3% |
| 2434 | GGCUAUAUGAAGCAAUUGA | 95.3% |
| 2435 | CAAAUUUGCAGCAAUAUGC | 95.2% |
| 2436 | AAAUUUGCAGCAAUAUGCA | 95.2% |
| 2437 | UUCAUGUAUUCAGAUUUUC | 95.2% |
| 2438 | AAUUUGCAGCAAUAUGCAC | 95.1% |
| 2439 | ACAAACAAAUUUGCAGCAA | 95.0% |
| 2440 | CAAACAAAUUUGCAGCAAU | 95.0% |
| 2441 | AAACAAAUUUGCAGCAAUA | 95.0% |
| 2442 | UUUUAGAGCCUAUGUGGAU | 94.9% |
| 2443 | AAUUUUAGAGCCUAUGUGG | 94.7% |
| 2444 | AUUUUAGAGCCUAUGUGGA | 94.7% |
| 2445 | GUAUUCAGAUUUUCAUUUC | 94.6% |
| 2446 | GCAUCCUGUGCAGCAAUGG | 94.6% |
| 2447 | AUGCAUCCUGUGCAGCAAU | 94.6% |
| 2448 | UAUUCAGAUUUUCAUUUCA | 94.6% |
| 2449 | GAAACAAACAAAUUUGCAG | 94.6% |
| 2450 | UGUAUUCAGAUUUUCAUUU | 94.6% |
| 2451 | AAUGCAUCCUGUGCAGCAA | 94.6% |
| 2452 | AACAAACAAAUUUGCAGCA | 94.6% |
| 2453 | AAACAAACAAAUUUGCAGC | 94.6% |
| 2454 | CAUCCUGUGCAGCAAUGGA | 94.6% |
| 2455 | AUUCAGAUUUUCAUUUCAU | 94.6% |
| 2456 | AUGUAUUCAGAUUUUCAUU | 94.6% |
| 2457 | UGCAUCCUGUGCAGCAAUG | 94.6% |
| 2458 | CAUGUAUUCAGAUUUUCAU | 94.5% |
| 2459 | AGAAUUUUAGAGCCUAUGU | 94.3% |
| 2460 | GAGAAUUUUAGAGCCUAUG | 94.2% |
| 2461 | GAUUUUCAUUUCAUCAAUG | 94.2% |
| 2462 | UGAGAAUUUUAGAGCCUAU | 94.2% |
| 2463 | UUGAGAAUUUUAGAGCCUA | 94.2% |
| 2464 | AUUUUCAUUUCAUCAAUGA | 94.2% |
| 2465 | UCAGAUUUUCAUUUCAUCA | 94.1% |
| 2466 | GAAUUUUAGAGCCUAUGUG | 94.1% |
| 2467 | CAGADUUUCAUUUCAUCAA | 94.1% |
| 2468 | GUUCAGGCUCUUAGGGACA | 94.1% |
| 2469 | UUCAGGCUCUUAGGGACAA | 94.1% |
| 2470 | AGAUUUUCAUUUCAUCAAU | 94.1% |
| 2471 | UUCAGAUUUUCAUUUCAUC | 94.0% |
| 2472 | AGAGGCGAAGAAACAAUUG | 93.7% |
| 2473 | GAGGCGAAGAAACAAUUGA | 93.7% |
| 2474 | GGCGAAGAAACAAUUGAAG | 93.5% |
| 2475 | CGAAGAAACAAUUGAAGAA | 93.5% |
| 2476 | GCGAAGAAACAAUUGAAGA | 93.5% |
| 2477 | AGGCGAAGAAACAAUUGAA | 93.5% |
| 2478 | GAAGAAACAAUUGAAGAAA | 93.5% |
| 2479 | AAAUGAAAUGGGGAAUGGA | 93.4% |
| 2480 | AAAAUGAAAUGGGGAAUGG | 93.4% |
| 2481 | UGAAAUGGGGAAUGGAGAU | 93.3% |
| 2482 | AAUGGGGAAUGGAGAUGAG | 93.3% |
| 2483 | CACAUUUUCUCAUUCACUG | 93.3% |
| 2484 | AAAUGGGGAAUGGAGAUGA | 93.3% |
| 2485 | GAAAUGGGGAAUGGAGAUG | 93.3% |
| 2486 | AUGAAAUGGGGAAUGGAGA | 93.3% |
| 2487 | ACAUUUUCUCAUUCACUGG | 93.2% |
| 2488 | AAAGAGGCGAAGAAACAAU | 92.8% |
| 2489 | GAAAGAGGCGAAGAAACAA | 92.8% |
| 2490 | AAUGAAAUGGGGAAUGGAG | 92.8% |
| 2491 | UAAACUUUGUGAGCAUGGA | 92.5% |
| 2492 | AAGAGGCGAAGAAACAAUU | 92.5% |
| 2493 | GUAAACUUUGUGAGCAUGG | 92.5% |
| 2494 | CAGUCCGAAAGAGGCGAAG | 92.5% |
| 2495 | AGUCCGAAAGAGGCGAAGA | 92.5% |
| 2496 | CGAAAGAGGCGAAGAAACA | 92.4% |
| 2497 | UGGUAAACUUUGUGAGCAU | 92.4% |
| 2498 | GUGGUAAACUUUGUGAGCA | 92.4% |
| 2499 | UUUGUGCGACAAUGCUUCA | 92.4% |
| 2500 | UCGUCAGUCCGAAAGAGGC | 92.4% |
| 2501 | UUGUGCGACAAUGCUUCAA | 92.4% |
| 2502 | UAAGCGAUUUGAAGCAAUA | 92.4% |
| 2503 | UUCGUCAGUCCGAAAGAGG | 92.4% |
| 2504 | CGUCAGUCCGAAAGAGGCG | 92.4% |
| 2505 | GUCAGUCCGAAAGAGGCGA | 92.4% |
| 2506 | UCAGUCCGAAAGAGGCGAA | 92.4% |
| 2507 | GGUAAACUUUGUGAGCAUG | 92.4% |
| 2508 | UCCGAAAGAGGCGAAGAAA | 92.4% |
| 2509 | CCGAAAGAGGCGAAGAAAC | 92.4% |
| 2510 | UUUCGUCAGUCCGAAAGAG | 92.4% |
| 2511 | UCCUUUCGUCAGUCCGAAA | 92.3% |
| 2512 | CCUUUCGUCAGUCCGAAAG | 92.3% |
| 2513 | GCGAUUUGAAGCAAUAUGA | 92.3% |
| 2514 | CUUUCGUCAGUCCGAAAGA | 92.3% |
| 2515 | AAGCGAUUUGAAGCAAUAU | 92.1% |
| 2516 | AAGAUUUUGUGCGACAAUG | 92.0% |
| 2517 | AGCGAUUUGAAGCAAUAUG | 92.0% |
| 2518 | GUCCGAAAGAGGCGAAGAA | 91.8% |
| 2519 | GGCAAGCUUUCUCAAAUGU | 91.5% |
| 2520 | ACAUUCUUUGGAUGGAAAG | 91.3% |
| 2521 | CAUUCUUUGGAUGGAAAGA | 91.3% |
| 2522 | GAUUUGAAGCAAUAUGAUA | 91.2% |
| 2523 | AGGGCAAGCUUUCUCAAAU | 91.2% |
| 2524 | UUGAGGGCAAGCUUUCUCA | 91.2% |
| 2525 | AUUUGAAGCAAUAUGAUAG | 91.2% |
| 2526 | AUUGAGGGCAAGCUUUCUC | 91.2% |
| 2527 | GAGGGCAAGCUUUCUCAAA | 91.2% |
| 2528 | GGGCAAGCUUUCUCAAAUG | 91.2% |
| 2529 | CAUUGAGGGCAAGCUUUCU | 91.2% |
| 2530 | GCAAGCUUUCUCAAAUGUC | 91.0% |
| 2531 | UGAGGGCAAGCUUUCUCAA | 91.0% |
| 2532 | CAGAAUGAGUUCAACAAGG | 91.0% |
| 2533 | AGAAUGAGUUCAACAAGGC | 91.0% |
| 2534 | AUAAGCGAUUUGAAGCAAU | 90.7% |
| 2535 | UUCUUUGGAUGGAAAGAAC | 90.5% |
| 2536 | CGAUUUGAAGCAAUAUGAU | 90.5% |
| 2537 | UCUUUGGAUGGAAAGAACC | 90.5% |
| 2538 | AGCCUAUGUGGAUGGAUUC | 90.4% |
| 2539 | CAAUGAAAGAGUAUGGAGA | 90.4% |
| 2540 | UGAAGCAAUAUGAUAGUGA | 90.2% |
| 2541 | UGGAAGAUUUUGUGCGACA | 90.1% |
| 2542 | AUGGAAGAUUUUGUGCGAC | 90.1% |
| 2543 | AAAGAGUUUUUUGAGAAUA | 90.1% |
| 2544 | UAAUGAAGGGGGUAUACAU | 90.0% |
| 2545 | GAAGAUUUUGUGCGACAAU | 90.0% |
| 2546 | UCUGGAUAGAGCUCGAUGA | 89.9% |
| 2547 | AUAAUGAAGGGGGUAUACA | 89.9% |
| 2548 | AUUCUUUGGAUGGAAAGAA | 89.9% |
| 2549 | UUGAAGCAAUAUGAUAGUG | 89.9% |
| 2550 | GAGAAAGACAUGACCAAAG | 89.6% |
| 2551 | UUUGAAGCAAUAUGAUAGU | 89.6% |
| 2552 | AGAAAGACAUGACCAAAGA | 89.4% |
| 2553 | GAUUUUGUGCGACAAUGCU | 89.4% |
| 2554 | AUUUUGUGCGACAAUGCUU | 89.4% |
| 2555 | UGAAGGGGGUAUACAUUAA | 89.3% |
| 2556 | AGAUUUUGUGCGACAAUGC | 89.2% |
| 2557 | GGAAGAUUUUGUGCGACAA | 89.2% |
| 2558 | AUGAAGGGGGUAUACAUUA | 89.2% |
| 2559 | AAUGAAGGGGGUAUACAUU | 89.2% |
| 2560 | CCUAUGUGGAUGGAUUCGA | 89.2% |
| 2561 | CUAUGUGGAUGGAUUCGAA | 89.2% |
| 2562 | AUGUGGAUGGAUUCGAACC | 89.1% |
| 2563 | UAUGUGGAUGGAUUCGAAC | 89.1% |
| 2564 | AAAGACAUGACCAAAGAGU | 89.0% |
| 2565 | AACAUUCUUUGGAUGGAAA | 89.0% |
| 2566 | AAGACAUGACCAAAGAGUU | 89.0% |
| 2567 | UUUUGUGCGACAAUGCUUC | 88.9% |
| 2568 | GCCUAUGUGGAUGGAUUCG | 88.7% |
| 2569 | GGGAUUCCUUUCGUCAGUC | 88.4% |
| 2570 | UGGGAUUCCUUUCGUCAGU | 88.4% |
| 2571 | GAAAGACAUGACCAAAGAG | 88.4% |
| 2572 | GCAAUGAAAGAGUAUGGAG | 88.3% |
| 2573 | AUUCCUUUCGUCAGUCCGA | 88.1% |
| 2574 | GAUUCCUUUCGUCAGUCCG | 88.1% |
| 2575 | GGAUUCCUUUCGUCAGUCC | 88.1% |
| 2576 | AAGGGGGUAUACAUUAAUA | 87.8% |
| 2577 | GAAGGGGGUAUACAUUAAU | 87.8% |
| 2578 | AAUGAAAGAGUAUGGAGAG | 87.8% |
| 2579 | AGGGGGUAUACAUUAAUAC | 87.8% |
| 2580 | UGUAUGAUUACAAGGAGAA | 87.7% |
| 2581 | CCGAACUUCUCCUGCCUUG | 87.4% |
| 2582 | CGAACUUCUCCUGCCUUGA | 87.4% |
| 2583 | AACUUCUCCUGCCUUGAGA | 87.3% |
| 2584 | GAACUUCUCCUGCCUUGAG | 87.3% |
| 2585 | AAAGAGAAAGACAUGACCA | 87.3% |
| 2586 | AUGGAUUCGAACCGAACGG | 87.2% |
| 2587 | AAGAGAAAGACAUGACCAA | 87.2% |
| 2588 | CUCUGGGAUUCCUUUCGUC | 87.2% |
| 2589 | GAUGGAUUCGAACCGAACG | 87.2% |
| 2590 | GGGUAUACAUUAAUACUGC | 87.2% |
| 2591 | GGGGUAUACAUUAAUACUG | 87.2% |
| 2592 | AAGCUUUCUCAAAUGUCCA | 87.1% |
| 2593 | AGCUUUCUCAAAUGUCCAA | 87.1% |
| 2594 | ACAUGACCAAAGAGUUUUU | 87.1% |
| 2595 | AGAGAAAGACAUGACCAAA | 87.1% |
| 2596 | UCUGGGAUUCCUUUCGUCA | 87.1% |
| 2597 | ACUUCUCCUGCCUUGAGAA | 87.1% |
| 2598 | GACAUGACCAAAGAGUUUU | 87.1% |
| 2599 | AGACAUGACCAAAGAGUUU | 87.1% |
| 2600 | GUGGAUGGAUUCGAACCGA | 87.0% |
| 2601 | AAGCACAGAUUUGAAAUAA | 87.0% |
| 2602 | AGCACAGAUUUGAAAUAAU | 87.0% |
| 2603 | CAAGCUUUCUCAAAUGUCC | 87.0% |
| 2604 | GCUUUCUCAAAUGUCCAAA | 87.0% |
| 2605 | UGGAUGGAUUCGAACCGAA | 87.0% |
| 2606 | GGGGGUAUACAUUAAUACU | 87.0% |
| 2607 | GGAUGGAUUCGAACCGAAC | 87.0% |
| 2608 | UGUGGAUGGAUUCGAACCG | 87.0% |
| 2609 | CUUGAGAAUUUUAGAGCCU | 86.9% |
| 2610 | GCCUUGAGAAUUUUAGAGC | 86.9% |
| 2611 | CUGCCUUGAGAAUUUUAGA | 86.9% |
| 2612 | UCCUGCCUUGAGAAUUUUA | 86.9% |
| 2613 | UGUGCAGCAAUGGACGAUU | 86.9% |
| 2614 | GUGCAGCAAUGGACGAUUU | 86.9% |
| 2615 | UUCUCCUGCCUUGAGAAUU | 86.9% |
| 2616 | CUCCUGCCUUGAGAAUUUU | 86.9% |
| 2617 | UGCCUUGAGAAUUUUAGAG | 86.9% |
| 2618 | UCUCCUGCCUUGAGAAUUU | 86.9% |
| 2619 | CCUGCCUUGAGAAUUUUAG | 86.9% |
| 2620 | CCUUGAGAAUUUUAGAGCC | 86.9% |
| 2621 | UGCAUUGAGGGCAAGCUUU | 86.8% |
| 2622 | GGCCUCUGGGAUUCCUUUC | 86.8% |
| 2623 | GCAUUGAGGGCAAGCUUUC | 86.8% |
| 2624 | AUCCUGUGCAGCAAUGGAC | 86.8% |
| 2625 | UCCUGUGCAGCAAUGGACG | 86.7% |
| 2626 | AGAGGCCUCUGGGAUUCCU | 86.6% |
| 2627 | AGGCCUCUGGGAUUCCUUU | 86.6% |
| 2628 | CUUCUCCUGCCUUGAGAAU | 86.6% |
| 2629 | GCCUCUGGGAUUCCUUUCG | 86.6% |
| 2630 | GAGGCCUCUGGGAUUCCUU | 86.6% |
| 2631 | CCUGUGCAGCAAUGGACGA | 86.6% |
| 2632 | CCUCUGGGAUUCCUUUCGU | 86.5% |
| 2633 | CUGGGAUUCCUUUCGUCAG | 86.5% |
| 2634 | CUGUGCAGCAAUGGACGAU | 86.4% |
| 2635 | GGAUUCGAACCGAACGGCU | 86.2% |
| 2636 | UGGAUUCGAACCGAACGGC | 86.2% |
| 2637 | CAGAGGCCUCUGGGAUUCC | 86.1% |
| 2638 | ACGGCUGCAUUGAGGGCAA | 86.0% |
| 2639 | AACGGCUGCAUUGAGGGCA | 86.0% |
| 2640 | GCUGCAUUGAGGGCAAGCU | 85.8% |
| 2641 | UUCCUUUCGUCAGUCCGAA | 85.8% |
| 2642 | CUGCAUUGAGGGCAAGCUU | 85.8% |
| 2643 | GGCUGCAUUGAGGGCAAGC | 85.8% |
| 2644 | CGGCUGCAUUGAGGGCAAG | 85.8% |
| 2645 | UUGUAUGAUUACAAGGAGA | 85.8% |
| 2646 | AUAGUGACGAACCUGAAUU | 85.7% |
| 2647 | GGGGCUAUAUGAAGCAAUU | 85.6% |
| 2648 | UGACCAAAGAGUUUUUUGA | 85.6% |
| 2649 | UUGUUCAGGCUCUUAGGGA | 85.5% |
| 2650 | CAUGACCAAAGAGUUUUUU | 85.5% |
| 2651 | AUGACCAAAGAGUUUUUUG | 85.5% |
| 2652 | UUUUCUCAUUCACUGGGGA | 85.4% |
| 2653 | UGUUCAGGCUCUUAGGGAC | 85.4% |
| 2654 | GACCAAAGAGUUUUUUGAG | 85.4% |
| 2655 | CAUUUUCUCAUUCACUGGG | 85.4% |
| 2656 | AUUUUCUCAUUCACUGGGG | 85.4% |
| 2657 | AAGCAAUAUGAUAGUGACG | 85.4% |
| 2658 | GAUAGUGACGAACCUGAAU | 85.4% |
| 2659 | AGCAAUAUGAUAGUGACGA | 85.3% |
| 2660 | ACCAAAGAGUUUUUUGAGA | 85.2% |
| 2661 | CUUGCCGACCAAAGUCUCC | 85.2% |
| 2662 | UUGCCGACCAAAGUCUCCC | 85.2% |
| 2663 | UAUGAUAGUGACGAACCUG | 85.1% |
| 2664 | AAUAUGAUAGUGACGAACC | 85.1% |
| 2665 | UGAUAGUGACGAACCUGAA | 85.1% |
| 2666 | AUGAUAGUGACGAACCUGA | 85.1% |
| 2667 | CAAUAUGAUAGUGACGAAC | 85.1% |
| 2668 | UUGAUGAUCCAAAUGCACU | 85.1% |
| 2669 | CUUUCUCAAAUGUCCAAAG | 85.0% |
| 2670 | UCAAUAGCCUGUAUGCAUC | 85.0% |
| 2671 | AAGGCCUAUGUUCUUGUAU | 85.0% |
| 2672 | AAAUGGGAGAAAUACUGUG | 85.0% |
| 2673 | AUAUGAUAGUGACGAACCU | 85.0% |
| 2674 | AAUGGGAGAAAUACUGUGU | 85.0% |
| 2675 | CUUGAUGAUCCAAAUGCAC | 85.0% |
| 2676 | UUCAAUAGCCUGUAUGCAU | 85.0% |
| 2677 | GAAGCAAUAUGAUAGUGAC | 85.0% |
| 2678 | GCUUGCCGACCAAAGUCUC | 84.9% |
| 2679 | CAAGGCCUAUGUUCUUGUA | 84.9% |
| 2680 | GCAAUAUGAUAGUGACGAA | 84.9% |
| 2681 | UCAAGGCCUAUGUUCUUGU | 84.9% |
| 2682 | CCAAAGAGUUUUUUGAGAA | 84.8% |
| 2683 | AGGCCUAUGUUCUUGUAUG | 84.8% |
| 2684 | UAAGAAGUGCCAUAGGCCA | 84.8% |
| 2685 | GGCCUAUGUUCUUGUAUGU | 84.6% |
| 2686 | CUCAAAUGUCCAAAGAAGU | 84.6% |
| 2687 | UCUCAAAUGUCCAAAGAAG | 84.6% |
| 2688 | UUUCUCAAAUGUCCAAAGA | 84.5% |
| 2689 | AACCGAACGGCUGCAUUGA | 84.4% |
| 2690 | CCAAUAAAAUUAAAUCUGA | 84.4% |
| 2691 | GCCAAUAAAAUUAAAUCUG | 84.4% |
| 2692 | UUCUCAAAUGUCCAAAGAA | 84.3% |
| 2693 | AGGCUUGCCGACCAAAGUC | 84.3% |
| 2694 | AGGUCACUUUCAAGCUGGA | 84.3% |
| 2695 | CUAUGUUCUUGUAUGUGAG | 84.3% |
| 2696 | GGUCACUUUCAAGCUGGAU | 84.3% |
| 2697 | UGUGGUAAACUUUGUGAGC | 84.3% |
| 2698 | CGAACGGCUGCAUUGAGGG | 84.3% |
| 2699 | AUGUGGUAAACUUUGUGAG | 84.3% |
| 2700 | CCUAUGUUCUUGUAUGUGA | 84.3% |
| 2701 | GAUGUGGUAAACUUUGUGA | 84.3% |
| 2702 | GGCUUGCCGACCAAAGUCU | 84.3% |
| 2703 | CCGAACGGCUGCAUUGAGG | 84.2% |
| 2704 | CAAUAAAAUUAAAUCUGAG | 84.2% |
| 2705 | GCCUAUGUUCUUGUAUGUG | 84.2% |
| 2706 | ACAGAGGCCUCUGGGAUUC | 84.1% |
| 2707 | ACCGAACGGCUGCAUUGAG | 84.1% |
| 2708 | ACGAACCUGAAUUAAGGUC | 84.1% |
| 2709 | AUGUUCUUGUAUGUGAGGA | 84.1% |
| 2710 | UUUUCUCUCACUGACCCGA | 84.1% |
| 2711 | AACAGAGGCCUCUGGGAUU | 84.1% |
| 2712 | UUUCUCUCACUGACCCGAG | 84.1% |
| 2713 | GAACGGCUGCAUUGAGGGC | 84.1% |
| 2714 | UGUUCUUGUAUGUGAGGAC | 84.1% |
| 2715 | AAUAAAAUUAAAUCUGAGA | 84.0% |
| 2716 | GACGAACCUGAAUUAAGGU | 84.0% |
| 2717 | AUAAAAUUAAAUCUGAGAA | 84.0% |
| 2718 | GCCAACAGAGGCCUCUGGG | 83.9% |
| 2719 | UGGCCAACAGAGGCCUCUG | 83.9% |
| 2720 | CUAAGAAGUGCCAUAGGCC | 83.9% |
| 2721 | CCAACAGAGGCCUCUGGGA | 83.9% |
| 2722 | CAACAGAGGCCUCUGGGAU | 83.9% |
| 2723 | GGCCAACAGAGGCCUCUGG | 83.9% |
| 2724 | AUGGCCAACAGAGGCCUCU | 83.8% |
| 2725 | UUCUUGUAUGUGAGGACAA | 83.8% |
| 2726 | UCUUGUAUGUGAGGACAAA | 83.8% |
| 2727 | AAAAGGCCAAUAAAAUUAA | 83.7% |
| 2728 | AGGCCAAUAAAAUUAAAUC | 83.7% |
| 2729 | AAAGGCCAAUAAAAUUAAA | 83.7% |
| 2730 | GAAAAGGCCAAUAAAAUUA | 83.7% |
| 2731 | CGAACCUGAAUUAAGGUCA | 83.7% |
| 2732 | UUUUUUGAGAAUAAAUCAG | 83.7% |
| 2733 | AAGGCCAAUAAAAUUAAAU | 83.7% |
| 2734 | GUUCUUGUAUGUGAGGACA | 83.6% |
| 2735 | UUUUUGAGAAUAAAUCAGA | 83.6% |
| 2736 | UUUUGAGAAUAAAUCAGAA | 83.5% |
| 2737 | GUUUUUUGAGAAUAAAUCA | 83.3% |
| 2738 | AGUUUUUUGAGAAUAAAUC | 83.3% |
| 2739 | AAGAGUUUUUUGAGAAUAA | 83.3% |
| 2740 | GAGUUUUUUGAGAAUAAAU | 83.3% |
| 2741 | AGUGACGAACCUGAAUUAA | 83.2% |
| 2742 | GUGACGAACCUGAAUUAAG | 83.2% |
| 2743 | AAAUGGCCAACAGAGGCCU | 83.2% |
| 2744 | GGGGGCUAUAUGAAGCAAU | 83.2% |
| 2745 | GAAAUGGCCAACAGAGGCC | 83.2% |
| 2746 | CAAAGAGUUUUUUGAGAAU | 83.2% |
| 2747 | AGAGUUUUUUGAGAAUAAA | 83.2% |
| 2748 | UGGACAGUAGUAAACAGUA | 83.0% |
| 2749 | GGACAGUAGUAAACAGUAU | 83.0% |
| 2750 | GGCCAAUAAAAUUAAAUCU | 82.9% |
| 2751 | ACAAUGGCCUGGACAGUAG | 82.9% |
| 2752 | CAAUGGCCUGGACAGUAGU | 82.9% |
| 2753 | GCCUGGACAGUAGUAAACA | 82.8% |
| 2754 | AUGGCCUGGACAGUAGUAA | 82.8% |
| 2755 | UGGCCUGGACAGUAGUAAA | 82.8% |
| 2756 | ACAUAAGCGAUUUGAAGCA | 82.8% |
| 2757 | GGGGGGCUAUAUGAAGCAA | 82.8% |
| 2758 | GGCCUGGACAGUAGUAAAC | 82.8% |
| 2759 | GGAGAAAUACUGUGUCCUU | 82.7% |
| 2760 | GACAUAAGCGAUUUGAAGC | 82.7% |
| 2761 | AGAAAUACUGUGUCCUUGA | 82.7% |
| 2762 | UGGGAGAAAUACUGUGUCC | 82.7% |
| 2763 | GGGAGAAAUACUGUGUCCU | 82.7% |
| 2764 | AGACAUAAGCGAUUUGAAG | 82.7% |
| 2765 | GAGAAAUACUGUGUCCUUG | 82.7% |
| 2766 | CCUGGACAGUAGUAAACAG | 82.7% |
| 2767 | GAGACAUAAGCGAUUUGAA | 82.6% |
| 2768 | AGAGACAUAAGCGAUUUGA | 82.6% |
| 2769 | GAGGAAAGCAGGGCUAGGA | 82.6% |
| 2770 | AGGAAAGCAGGGCUAGGAU | 82.6% |
| 2771 | AUGGGAGAAAUACUGUGUC | 82.6% |
| 2772 | UGAUUGAAGCCGAGUCCUC | 82.5% |
| 2773 | UACCUUGAAAAGGCCAAUA | 82.5% |
| 2774 | AUGAUUGAAGCCGAGUCCU | 82.5% |
| 2775 | CAUAAGCGAUUUGAAGCAA | 82.4% |
| 2776 | ACCUUGAAAAGGCCAAUAA | 82.4% |
| 2777 | AACAUGGCACCAGAGAAAG | 82.4% |
| 2778 | UCACAGCAGAGGUGUCCCA | 82.4% |
| 2779 | CUAAAAACAUGAAGAAAAC | 82.4% |
| 2780 | UUCACAGCAGAGGUGUCCC | 82.4% |
| 2781 | ACAACACCAAGACCAAUCA | 82.4% |
| 2782 | ACAUGGCACCAGAGAAAGU | 82.4% |
| 2783 | AAUGGCCAACAGAGGCCUC | 82.3% |
| 2784 | AUGUCCAAAGAAGUGAAUG | 82.3% |
| 2785 | UUCUCUCACUGACCCGAGA | 82.3% |
| 2786 | UGUCCAAAGAAGUGAAUGC | 82.3% |
| 2787 | UUGAAAAGGCCAAUAAAAU | 82.3% |
| 2788 | CAUGGCCCAUUGGGGAGUC | 82.3% |
| 2789 | AGCCACAUAAAUGGGAGAA | 82.2% |
| 2790 | AAUGGCCUGGACAGUAGUA | 82.2% |
| 2791 | CCACAUAAAUGGGAGAAAU | 82.2% |
| 2792 | ACAUAAAUGGGAGAAAUAC | 82.2% |
| 2793 | GAGCCACAUAAAUGGGAGA | 82.2% |
| 2794 | AGCAUGAUUGAAGCCGAGU | 82.2% |
| 2795 | UGACGAACCUGAAUUAAGG | 82.2% |
| 2796 | CAAAUGUCCAAAGAAGUGA | 82.2% |
| 2797 | GCAUGAUUGAAGCCGAGUC | 82.2% |
| 2798 | UGAAAAGGCCAAUAAAAUU | 82.2% |
| 2799 | AUAAAUGGGAGAAAUACUG | 82.2% |
| 2800 | CAUAAAUGGGAGAAAUACU | 82.2% |
| 2801 | CACAUAAAUGGGAGAAAUA | 82.2% |
| 2802 | AAAUGUCCAAAGAAGUGAA | 82.2% |
| 2803 | UAAAUGGGAGAAAUACUGU | 82.2% |
| 2804 | AAUGUCCAAAGAAGUGAAU | 82.2% |
| 2805 | CUUGAAAAGGCCAAUAAAA | 82.1% |
| 2806 | CUGGACAGUAGUAAACAGU | 82.1% |
| 2807 | GAACCGAACGGCUGCAUUG | 82.1% |
| 2808 | UUUUCAUUUCAUCAAUGAA | 82.1% |
| 2809 | GCCACAUAAAUGGGAGAAA | 82.0% |
| 2810 | UGCAGAACUAAAGAGGGAA | 82.0% |
| 2811 | CGAACCGAACGGCUGCAUU | 81.9% |
| 2812 | CACACGAAAAGGGAAUAAA | 81.9% |
| 2813 | UUUCAUUUCAUCAAUGAAC | 81.9% |
| 2814 | UCGAACCGAACGGCUGCAU | 81.8% |
| 2815 | CCACACGAAAAGGGAAUAA | 81.8% |
| 2816 | UAGUGACGAACCUGAAUUA | 81.8% |
| 2817 | UUCGAACCGAACGGCUGCA | 81.8% |
| 2818 | GCAGAACUAAAGAGGGAAG | 81.8% |
| 2819 | ACACGAAAAGGGAAUAAAU | 81.7% |
| 2820 | UCUCUCACUGACCCGAGAC | 81.7% |
| 2821 | CUCUCACUGACCCGAGACU | 81.7% |
| 2822 | UUUCAUGUAUUCAGAUUUU | 81.6% |
| 2823 | GUUUCAUGUAUUCAGAUUU | 81.6% |
| 2824 | UGUUUCAUGUAUUCAGAUU | 81.6% |
| 2825 | AAAGCACAGAUUUGAAAUA | 81.4% |
| 2826 | ACCACACGAAAAGGGAAUA | 81.4% |
| 2827 | AAGAAAUGGCCAACAGAGG | 81.4% |
| 2828 | AUUCGAACCGAACGGCUGC | 81.4% |
| 2829 | CAAGAAAUGGCCAACAGAG | 81.4% |
| 2830 | UUCAUUUCAUCAAUGAACA | 81.4% |
| 2831 | UAUGUUCUUGUAUGUGAGG | 81.4% |
| 2832 | UAAAGCACAGAUUUGAAAU | 81.4% |
| 2833 | GAUUCGAACCGAACGGCUG | 81.4% |
| 2834 | AUUUCAUCAAUGAACAAGG | 81.3% |
| 2835 | UCAUUUCAUCAAUGAACAA | 81.3% |
| 2836 | CAUUUCAUCAAUGAACAAG | 81.3% |
| 2837 | AACCUGAAUUAAGGUCACU | 81.3% |
| 2838 | AAUUAAGGUCACUUUCAAG | 81.3% |
| 2839 | GAACCUGAAUUAAGGUCAC | 81.3% |
| 2840 | UCACUGGGGAGGAAAUGGC | 81.2% |
| 2841 | CAUUCACUGGGGAGGAAAU | 81.2% |
| 2842 | UCAUUCACUGGGGAGGAAA | 81.2% |
| 2843 | UUCACUGGGGAGGAAAUGG | 81.2% |
| 2844 | AUUCACUGGGGAGGAAAUG | 81.1% |
| 2845 | AAACCACACGAAAAGGGAA | 81.1% |
| 2846 | CACUGGGGAGGAAAUGGCC | 81.1% |
| 2847 | AACCACACGAAAAGGGAAU | 81.1% |
| 2848 | UGGGGAAUGGAGAUGAGAC | 81.0% |
| 2849 | UGAAUUAAGGUCACUUUCA | 81.0% |
| 2850 | AGCAUUGAAGACCCAAGUC | 81.0% |
| 2851 | GAAUUAAGGUCACUUUCAA | 81.0% |
| 2852 | GAAAAACCAAUUUAUAUGG | 81.0% |
| 2853 | AUGGGGAAUGGAGAUGAGA | 81.0% |
| 2854 | CUGAAUUAAGGUCACUUUC | 81.0% |
| 2855 | GCAUUGAAGACCCAAGUCA | 81.0% |
| 2856 | GGGGAAUGGAGAUGAGACG | 81.0% |
| 2857 | CCUGAAUUAAGGUCACUUU | 80.9% |
| 2858 | CGAAAAACCAAUUUAUAUG | 80.8% |
| 2859 | AAGGUCACUUUCAAGCUGG | 80.7% |
| 2860 | UGGCACCAGAGAAAGUAGA | 80.7% |
| 2861 | AUGGCACCAGAGAAAGUAG | 80.7% |
| 2862 | AGAAAUGGCCAACAGAGGC | 80.7% |
| 2863 | AGAGCAUGAUUGAAGCCGA | 80.6% |
| 2864 | CAUGGCACCAGAGAAAGUA | 80.6% |
| 2865 | AUUGAAGACCCAAGUCACG | 80.6% |
| 2866 | CAUUGAAGACCCAAGUCAC | 80.6% |
| 2867 | UCUCAUUCACUGGGGAGGA | 80.6% |
| 2868 | UUCUCAUUCACUGGGGAGG | 80.6% |
| 2869 | UUGAAGACCCAAGUCACGA | 80.6% |
| 2870 | CGGAGUCAAGAAAACUGCU | 80.6% |
| 2871 | ACCUGAAUUAAGGUCACUU | 80.6% |
| 2872 | GAGAGCAUGAUUGAAGCCG | 80.6% |
| 2873 | UAAGGUCACUUUCAAGCUG | 80.5% |
| 2874 | GCGGAGUCAAGAAAACUGC | 80.5% |
| 2875 | GCACCAGAGAAAGUAGACU | 80.4% |
| 2876 | CACCAGAGAAAGUAGACUU | 80.4% |
| 2877 | UUAAAGCACAGAUUUGAAA | 80.4% |
| 2878 | GGCACCAGAGAAAGUAGAC | 80.4% |
| 2879 | CCAGAGAAAGUAGACUUUG | 80.4% |
| 2880 | GAGCAUGAUUGAAGCCGAG | 80.4% |
| 2881 | ACCAGAGAAAGUAGACUUU | 80.3% |
| 2882 | CUCAUUCACUGGGGAGGAA | 80.3% |
| 2883 | AACACCAAGACCAAUCAAA | 80.3% |
| 2884 | UAUAUGAUGCGAUCAAGUG | 80.3% |
| 2885 | CCUUGAAAAGGCCAAUAAA | 80.3% |
| 2886 | CAGAGAAAGUAGACUUUGA | 80.2% |
| 2887 | UUUCUCAUUCACUGGGGAG | 80.2% |
| 2888 | ACACCAAGACCAAUCAAAC | 80.2% |
| 2889 | UUAAGGUCACUUUCAAGCU | 80.2% |
| 2890 | CACCAAGACCAAUCAAACU | 80.2% |
| 2891 | AUUAAGGUCACUUUCAAGC | 80.2% |
| 2892 | CAACACCAAGACCAAUCAA | 80.2% |
| 2893 | UUUUCAGCGGAGUCAAGAA | 80.1% |
| 2894 | ACUAAAAACAUGAAGAAAA | 80.1% |
| 2895 | CAGCGGAGUCAAGAAAACU | 80.1% |
| 2896 | UUUCAGCGGAGUCAAGAAA | 80.1% |
| 2897 | AGCGGAGUCAAGAAAACUG | 80.1% |
| 2898 | UUCAGCGGAGUCAAGAAAA | 80.1% |
| 2899 | UCAGCGGAGUCAAGAAAAC | 80.1% |
| 2900 | CCGAUGAUUGUCGAACUUG | 79.7% |
| 2901 | GCAAGCAUGAGGAGGAAUU | 79.7% |
| 2902 | CAUGAUUGAAGCCGAGUCC | 79.7% |
| 2903 | CGAUGAUUGUCGAACUUGC | 79.7% |
| 2904 | AUUGCAAGCAUGAGGAGGA | 79.7% |
| 2905 | UUGCAAGCAUGAGGAGGAA | 79.7% |
| 2906 | CAAGCAUGAGGAGGAAUUA | 79.7% |
| 2907 | GAUCCAAAUGCACUGUUAA | 79.7% |
| 2908 | CCAAGGGAGUGGAAGAAGG | 79.6% |
| 2909 | ACAUUGCAAGCAUGAGGAG | 79.6% |
| 2910 | AUCCAAAUGCACUGUUAAA | 79.6% |
| 2911 | CAUUGCAAGCAUGAGGAGG | 79.6% |
| 2912 | CCCAAGGGAGUGGAAGAAG | 79.6% |
| 2913 | GACCCAAGUCACGAAGGAG | 79.5% |
| 2914 | GGUAUACAUUAAUACUGCC | 79.5% |
| 2915 | ACCCAAGUCACGAAGGAGA | 79.5% |
| 2916 | UCAAUGCAUCCUGUGCAGC | 79.4% |
| 2917 | GAGGAAAUGGCCACAAAGG | 79.4% |
| 2918 | UGGAGAUGAGACGUUGCCU | 79.4% |
| 2919 | CAAUGCAUCCUGUGCAGCA | 79.4% |
| 2920 | AGGAAAUGGCCACAAAGGC | 79.4% |
| 2921 | UGCAAGCAUGAGGAGGAAU | 79.4% |
| 2922 | AUGGAGAUGAGACGUUGCC | 79.4% |
| 2923 | CUCAAUGCAUCCUGUGCAG | 79.4% |
| 2924 | ACAAUUGAAGAAAAAUUUG | 79.3% |
| 2925 | UGAUGAUCCAAAUGCACUG | 79.3% |
| 2926 | CAAUUGAAGAAAAAUUUGA | 79.3% |
| 2927 | AAUUGAAGAAAAAUUUGAA | 79.3% |
| 2928 | GCUCAAUGCAUCCUGUGCA | 79.3% |
| 2929 | UCAAACCACACGAAAAGGG | 79.3% |
| 2930 | UUGAAGAAAAAUUUGAAAU | 79.3% |
| 2931 | GGAGAUGAGACGUUGCCUC | 79.3% |
| 2932 | AUUGAAGAAAAAUUUGAAA | 79.3% |
| 2933 | UGCUCAAUGCAUCCUGUGC | 79.3% |
| 2934 | GAGAUGAGACGUUGCCUCC | 79.2% |
| 2935 | GAAUGGAGAUGAGACGUUG | 79.2% |
| 2936 | GAAGACCCAAGUCACGAAG | 79.2% |
| 2937 | UGUUAAAGCACAGAUUUGA | 79.2% |
| 2938 | GGAAUGGAGAUGAGACGUU | 79.2% |
| 2939 | UGAAGAAAAAUUUGAAAUC | 79.2% |
| 2940 | AAGACCCAAGUCACGAAGG | 79.2% |
| 2941 | GCAGCAAUGGACGAUUUUC | 79.2% |
| 2942 | AGAUGAGACGUUGCCUCCU | 79.2% |
| 2943 | GUCAAACCACACGAAAAGG | 79.2% |
| 2944 | CAGCAAUGGACGAUUUUCA | 79.2% |
| 2945 | UGCAGCAAUGGACGAUUUU | 79.2% |
| 2946 | GGGAAUGGAGAUGAGACGU | 79.2% |
| 2947 | AUGCACUGUUAAAGCACAG | 79.1% |
| 2948 | CUGUUAAAGCACAGAUUUG | 79.1% |
| 2949 | AAUGCACUGUUAAAGCACA | 79.1% |
| 2950 | AAUGGAGAUGAGACGUUGC | 79.1% |
| 2951 | AAAUGCACUGUUAAAGCAC | 79.0% |
| 2952 | ACUGUUAAAGCACAGAUUU | 79.0% |
| 2953 | CCAAAUGCACUGUUAAAGC | 79.0% |
| 2954 | UGAAGACCCAAGUCACGAA | 79.0% |
| 2955 | GCACUGUUAAAGCACAGAU | 79.0% |
| 2956 | CAAAUGCACUGUUAAAGCA | 79.0% |
| 2957 | CACUGUUAAAGCACAGAUU | 79.0% |
| 2958 | UUCAUCAAUGAACAAGGCG | 78.9% |
| 2959 | UGCACUGUUAAAGCACAGA | 78.9% |
| 2960 | UCAUCAAUGAACAAGGCGA | 78.9% |
| 2961 | AUGUUUCAUGUAUUCAGAU | 78.9% |
| 2962 | UCCAAAUGCACUGUUAAAG | 78.8% |
| 2963 | GGGAGGAAAUGGCCACAAA | 78.8% |
| 2964 | CAAAGGCAGACUACACUCU | 78.8% |
| 2965 | GGGGAGGAAAUGGCCACAA | 78.8% |
| 2966 | UAUGUUUCAUGUAUUCAGA | 78.8% |
| 2967 | GGAGGAAAUGGCCACAAAG | 78.8% |
| 2968 | GUAUGUUUCAUGUAUUCAG | 78.8% |
| 2969 | ACUGGGGAGGAAAUGGCCA | 78.7% |
| 2970 | UUUCAUCAAUGAACAAGGC | 78.7% |
| 2971 | GACAACACCAAGACCAAUC | 78.7% |
| 2972 | CUGGGGAGGAAAUGGCCAC | 78.7% |
| 2973 | AGCAAUGGACGAUUUUCAA | 78.7% |
| 2974 | UGGGGAGGAAAUGGCCACA | 78.7% |
| 2975 | AUGAUAAGCAAGUGCAGAA | 78.7% |
| 2976 | AAUUAUUUCACAGCAGAGG | 78.6% |
| 2977 | GUUAAAGCACAGAUUUGAA | 78.6% |
| 2978 | AAAACAUGAAGAAAACGAG | 78.6% |
| 2979 | AAAAACAUGAAGAAAACGA | 78.6% |
| 2980 | ACAUGAAGAAAACGAGUCA | 78.6% |
| 2981 | AUUAUUUCACAGCAGAGGU | 78.6% |
| 2982 | UCAAAAUGAAAUGGGGAAU | 78.6% |
| 2983 | AAACAUGAAGAAAACGAGU | 78.6% |
| 2984 | UGAUAAGCAAGUGCAGAAC | 78.6% |
| 2985 | AACAUGAAGAAAACGAGUC | 78.6% |
| 2986 | CAAAAUGAAAUGGGGAAUG | 78.5% |
| 2987 | AUGAUCCAAAUGCACUGUU | 78.4% |
| 2988 | AGGAAUUAUUUCACAGCAG | 78.4% |
| 2989 | GAAUUAUUUCACAGCAGAG | 78.4% |
| 2990 | GGAAUUAUUUCACAGCAGA | 78.4% |
| 2991 | GAUGAUCCAAAUGCACUGU | 78.3% |
| 2992 | AAAGCAGGGCUAGGAUUAA | 78.3% |
| 2993 | GUUGUUCAGGCUCUUAGGG | 78.3% |
| 2994 | AUGAGGAGGAAUUAUUUCA | 78.3% |
| 2995 | UGAGGAGGAAUUAUUUCAC | 78.3% |
| 2996 | GAUAAGCAAGUGCAGAACU | 78.1% |
| 2997 | UUAAAGAGAAAGACAUGAC | 78.1% |
| 2998 | GAAAGCAGGGCUAGGAUUA | 78.1% |
| 2999 | UAAGCAAGUGCAGAACUAA | 78.1% |
| 3000 | UGAUCCAAAUGCACUGUUA | 78.1% |
| 3001 | UACAUUGCAAGCAUGAGGA | 78.1% |
| 3002 | AGCAAGUGCAGAACUAAAG | 78.0% |
| 3003 | UAAAGAGAAAGACAUGACC | 78.0% |
| 3004 | GCAAGUGCAGAACUAAAGA | 78.0% |
| 3005 | AUAAGCAAGUGCAGAACUA | 78.0% |
| 3006 | AAGCAAGUGCAGAACUAAA | 78.0% |
| 3007 | UUCACAUUUUCUCAUUCAC | 77.9% |
| 3008 | AUUUCACAGCAGAGGUGUC | 77.9% |
| 3009 | AAGUGCAGAACUAAAGAGG | 77.9% |
| 3010 | AGUGCAGAACUAAAGAGGG | 77.9% |
| 3011 | GUGCAGAACUAAAGAGGGA | 77.9% |
| 3012 | CUUGUUGUUCAGGCUCUUA | 77.9% |
| 3013 | UAUUUCACAGCAGAGGUGU | 77.9% |
| 3014 | CAAGUGCAGAACUAAAGAG | 77.9% |
| 3015 | UUGUUGUUCAGGCUCUUAG | 77.8% |
| 3016 | GGGAGAGACAGAACAAUGG | 77.8% |
| 3017 | CAAACCACACGAAAAGGGA | 77.8% |
| 3018 | GGAUACAGAAUGAGUUCAA | 77.8% |
| 3019 | UCACAUUUUCUCAUUCACU | 77.8% |
| 3020 | UGGAUACAGAAUGAGUUCA | 77.8% |
| 3021 | GGAGAGACAGAACAAUGGC | 77.8% |
| 3022 | GAACAAUGGCCUGGACAGU | 77.7% |
| 3023 | CAAGCUGGAUACAGAAUGA | 77.7% |
| 3024 | UACAGAAUGAGUUCAACAA | 77.7% |
| 3025 | AGCAUGAGGAGGAAUUAUU | 77.6% |
| 3026 | AUACAGAAUGAGUUCAACA | 77.6% |
| 3027 | AGGGGAGAGACAGAACAAU | 77.6% |
| 3028 | GAGGGGAGAGACAGAACAA | 77.6% |
| 3029 | GGGGAGAGACAGAACAAUG | 77.6% |
| 3030 | GCAUGAGGAGGAAUUAUUU | 77.6% |
| 3031 | UCAAGCUGGAUACAGAAUG | 77.6% |
| 3032 | UGUUGUUCAGGCUCUUAGG | 77.6% |
| 3033 | UUAUUUCACAGCAGAGGUG | 77.6% |
| 3034 | GAUACAGAAUGAGUUCAAC | 77.6% |
| 3035 | AUUCACAUUUUCUCAUUCA | 77.6% |
| 3036 | ACAGCAGAGGUGUCCCAUU | 77.6% |
| 3037 | CAGCAGAGGUGUCCCAUUG | 77.6% |
| 3038 | CACACAUUCACAUUUUCUC | 77.6% |
| 3039 | AAGCAUGAGGAGGAAUUAU | 77.6% |
| 3040 | CUGGAUACAGAAUGAGUUC | 77.5% |
| 3041 | CAUUCACAUUUUCUCAUUC | 77.5% |
| 3042 | ACACACAUUCACAUUUUCU | 77.5% |
| 3043 | CAUGAGGAGGAAUUAUUUC | 77.5% |
| 3044 | AGACCCAAGUCACGAAGGA | 77.5% |
| 3045 | ACAUUCACAUUUUCUCAUU | 77.5% |
| 3046 | CACAGCAGAGGUGUCCCAU | 77.5% |
| 3047 | ACACAUUCACAUUUUCUCA | 77.5% |
| 3048 | GCUGGAUACAGAAUGAGUU | 77.5% |
| 3049 | ACCAAGACCAAUCAAACUU | 77.5% |
| 3050 | AAGCUGGAUACAGAAUGAG | 77.5% |
| 3051 | AGCUGGAUACAGAAUGAGU | 77.5% |
| 3052 | UUUCACAGCAGAGGUGUCC | 77.5% |
| 3053 | CACAUUCACAUUUUCUCAU | 77.5% |
| 3054 | CCAAGACCAAUCAAACUUC | 77.5% |
| 3055 | GAUCCCUGGGUUUUGCUCA | 77.4% |
| 3056 | CCUGGGUUUUGCUCAAUGC | 77.4% |
| 3057 | UGAUCCCUGGGUUUUGCUC | 77.4% |
| 3058 | CAUAAUGAAGGGGGUAUAC | 77.4% |
| 3059 | ACAUAAUGAAGGGGGUAUA | 77.4% |
| 3060 | CCCUGGGUUUUGCUCAAUG | 77.4% |
| 3061 | AUCCCUGGGUUUUGCUCAA | 77.4% |
| 3062 | ACAGAAUGAGUUCAACAAG | 77.4% |
| 3063 | CAAGACCAAUCAAACUUCC | 77.4% |
| 3064 | UACAUAAUGAAGGGGGUAU | 77.4% |
| 3065 | UCCCUGGGUUUUGCUCAAU | 77.4% |
| 3066 | AGAGACAGAACAAUGGCCU | 77.3% |
| 3067 | AGACAGAACAAUGGCCUGG | 77.3% |
| 3068 | ACAGAACAAUGGCCUGGAC | 77.3% |
| 3069 | UGAUUGUCGAACUUGCAGA | 77.3% |
| 3070 | GAGACAGAACAAUGGCCUG | 77.3% |
| 3071 | AUGAUUGUCGAACUUGCAG | 77.3% |
| 3072 | GACAGAACAAUGGCCUGGA | 77.3% |
| 3073 | UAAAAACAUGAAGAAAACG | 77.1% |
| 3074 | GAGAGACAGAACAAUGGCC | 77.1% |
| 3075 | AAACAAUUGAAGAAAAAUU | 77.0% |
| 3076 | AACAAUUGAAGAAAAAUUU | 77.0% |
| 3077 | GAGGAGGAAUUAUUUCACA | 76.9% |
| 3078 | GAAACAAUUGAAGAAAAAU | 76.9% |
| 3079 | GAGAAAGUAGACUUUGACA | 76.9% |
| 3080 | AGGAGGAAUUAUUUCACAG | 76.9% |
| 3081 | GGAGGAAUUAUUUCACAGC | 76.9% |
| 3082 | AGAACAAUGGCCUGGACAG | 76.9% |
| 3083 | CAGAACAAUGGCCUGGACA | 76.9% |
| 3084 | GAACCUGGGACCUUUGAUC | 76.8% |
| 3085 | AUAUGAUGCGAUCAAGUGC | 76.8% |
| 3086 | CUUUCAAGCUGGAUACAGA | 76.8% |
| 3087 | UAUGAUGCGAUCAAGUGCA | 76.8% |
| 3088 | AUGAUGCGAUCAAGUGCAU | 76.8% |
| 3089 | GAUUCAUCGAAAUUGGAGU | 76.8% |
| 3090 | AACCUGGGACCUUUGAUCU | 76.8% |
| 3091 | AGAAACAAUUGAAGAAAAA | 76.7% |
| 3092 | AAGAAACAAUUGAAGAAAA | 76.7% |
| 3093 | GAGGAAUUAUUUCACAGCA | 76.7% |
| 3094 | CACUUUCAAGCUGGAUACA | 76.5% |
| 3095 | UCACUUUCAAGCUGGAUAC | 76.5% |
| 3096 | GAUGAUUGUCGAACUUGCA | 76.5% |
| 3097 | AGAAAGUAGACUUUGACAA | 76.4% |
| 3098 | CCACAAAGGCAGACUACAC | 76.3% |
| 3099 | ACUUUCAAGCUGGAUACAG | 76.3% |
| 3100 | GAAAUGGCCACAAAGGCAG | 76.3% |
| 3101 | AUGGCCACAAAGGCAGACU | 76.3% |
| 3102 | GCCACAAAGGCAGACUACA | 76.3% |
| 3103 | AAAGUAGACUUUGACAACU | 76.3% |
| 3104 | GAGGUAUGUUUCAUGUAUU | 76.3% |
| 3105 | ACAAAGGCAGACUACACUC | 76.3% |
| 3106 | UGGCCACAAAGGCAGACUA | 76.3% |
| 3107 | UUCAAGCUGGAUACAGAAU | 76.3% |
| 3108 | AGGUAUGUUUCAUGUAUUC | 76.3% |
| 3109 | AAGUAGACUUUGACAACUG | 76.2% |
| 3110 | AAAUGGCCACAAAGGCAGA | 76.2% |
| 3111 | AAAUGGAAGAUUUUGUGCG | 76.2% |
| 3112 | UUUCAAGCUGGAUACAGAA | 76.2% |
| 3113 | GGAGGUAUGUUUCAUGUAU | 76.2% |
| 3114 | GGUAUGUUUCAUGUAUUCA | 76.2% |
| 3115 | GGCCACAAAGGCAGACUAC | 76.2% |
| 3116 | UGGAGGUAUGUUUCAUGUA | 76.2% |
| 3117 | CACAAAGGCAGACUACACU | 76.2% |
| 3118 | AAUGGAAGAUUUUGUGCGA | 76.1% |
| 3119 | AGAGAAAGUAGACUUUGAC | 76.1% |
| 3120 | GAAAGUAGACUUUGACAAC | 76.1% |
| 3121 | AAUGGCCACAAAGGCAGAC | 76.0% |
| 3122 | GUCACUUUCAAGCUGGAUA | 76.0% |
| 3123 | UUCAACCCGAUGAUUGUCG | 75.9% |
| 3124 | UCAGGCUCUUAGGGACAAC | 75.9% |
| 3125 | CAGGCUCUUAGGGACAACC | 75.9% |
| 3126 | CCAUUGGGAAAGUCUGUAG | 75.9% |
| 3127 | AGGCUCUUAGGGACAACCU | 75.9% |
| 3128 | UCAACCCGAUGAUUGUCGA | 75.9% |
| 3129 | UCCAUUGGGAAAGUCUGUA | 75.8% |
| 3130 | ACAUAUAUUACCUUGAAAA | 75.7% |
| 3131 | CAUUGGGAAAGUCUGUAGG | 75.7% |
| 3132 | UUGGGAAAGUCUGUAGGAC | 75.7% |
| 3133 | AUUGGGAAAGUCUGUAGGA | 75.7% |
| 3134 | CACAUAUAUUACCUUGAAA | 75.7% |
| 3135 | UCCACAUAUAUUACCUUGA | 75.7% |
| 3136 | CCACAUAUAUUACCUUGAA | 75.7% |
| 3137 | UAGAACUUGAUGAUCCAAA | 75.6% |
| 3138 | UUUGCAGCAAUAUGCACUC | 75.6% |
| 3139 | UUGCAGCAAUAUGCACUCA | 75.6% |
| 3140 | AUUUGCAGCAAUAUGCACU | 75.6% |
| 3141 | AAGUCCACAUAUAUUACCU | 75.6% |
| 3142 | UUGUCGAACUUGCAGAAAA | 75.6% |
| 3143 | GAAGUCCACAUAUAUUACC | 75.6% |
| 3144 | GAACUUGAUGAUCCAAAUG | 75.6% |
| 3145 | GUAGAACUUGAUGAUCCAA | 75.5% |
| 3146 | AACUUGAUGAUCCAAAUGC | 75.5% |
| 3147 | GGAAAUGGCCACAAAGGCA | 75.5% |
| 3148 | GAUUGUCGAACUUGCAGAA | 75.5% |
| 3149 | AUUGUCGAACUUGCAGAAA | 75.5% |
| 3150 | AGAACUUGAUGAUCCAAAU | 75.5% |
| 3151 | ACUUGAUGAUCCAAAUGCA | 75.4% |
| 3152 | AACAAUGGCCUGGACAGUA | 75.4% |
| 3153 | UGCAGCAAUAUGCACUCAC | 75.4% |
| 3154 | GUCCACAUAUAUUACCUUG | 75.3% |
| 3155 | CAUCAAUGAACAAGGCGAA | 75.3% |
| 3156 | AGUCCACAUAUAUUACCUU | 75.3% |
| 3157 | AGAUUCAUCGAAAUUGGAG | 75.3% |
| 3158 | AUCAAUGAACAAGGCGAAU | 75.2% |
| 3159 | ACCAAUUUAUAUGGAUUCA | 75.2% |
| 3160 | CCAAUUUAUAUGGAUUCAU | 75.2% |
| 3161 | CAAUUUAUAUGGAUUCAUC | 75.2% |
| 3162 | UCAAUGAACAAGGCGAAUC | 75.2% |
| 3163 | ACCCGAUGAUUGUCGAACU | 75.1% |
| 3164 | AACCCGAUGAUUGUCGAAC | 75.1% |
| 3165 | AAUGAACAAGGCGAAUCAA | 75.1% |
| 3166 | CAACCCGAUGAUUGUCGAA | 75.1% |
| 3167 | AUGAACAAGGCGAAUCAAU | 75.1% |
| 3168 | AAAAUUGAACCUUUUCUGA | 74.9% |
| 3169 | CCCGAUGAUUGUCGAACUU | 74.9% |
| 3170 | UGAACAAGGCGAAUCAAUA | 74.9% |
| 3171 | CAAUGAACAAGGCGAAUCA | 74.9% |
| 3172 | UUUGAGAAUAAAUCAGAAG | 74.8% |
| 3173 | UUGAAACAAACAAAUUUGC | 74.7% |
| 3174 | AUUGAAACAAACAAAUUUG | 74.7% |
| 3175 | AAAACCAAUUUAUAUGGAU | 74.7% |
| 3176 | UUGAGAAUAAAUCAGAAGC | 74.7% |
| 3177 | AAAUUGAAACAAACAAAUU | 74.7% |
| 3178 | UGGGAAAGUCUGUAGGACU | 74.7% |
| 3179 | AAACCAAUUUAUAUGGAUU | 74.7% |
| 3180 | AAAAUUGAAACAAACAAAU | 74.7% |
| 3181 | AACCAAUUUAUAUGGAUUC | 74.6% |
| 3182 | UGAAACAAACAAAUUUGCA | 74.6% |
| 3183 | AAUUGAAACAAACAAAUUU | 74.6% |
| 3184 | UGGUUCAACUCCUUCCUGA | 74.6% |
| 3185 | AGCUCGAUGAAAUUGGAGA | 74.5% |
| 3186 | GAGCUCGAUGAAAUUGGAG | 74.5% |
| 3187 | AUCGAGAGCAUGAUUGAAG | 74.5% |
| 3188 | UGGAUAGAGCUCGAUGAAA | 74.5% |
| 3189 | GGAUAGAGCUCGAUGAAAU | 74.5% |
| 3190 | AAUCAGAAGCAUGGCCCAU | 74.4% |
| 3191 | AAAUCAGAAGCAUGGCCCA | 74.4% |
| 3192 | UCAAAUGUCCAAAGAAGUG | 74.4% |
| 3193 | UGCAGAGACAUAAGCGAUU | 74.3% |
| 3194 | UUGUGAGCAUGGAGUUUUC | 74.3% |
| 3195 | AUAGAGCUCGAUGAAAUUG | 74.3% |
| 3196 | UCGAGAGCAUGAUUGAAGC | 74.3% |
| 3197 | AAAGGCAGACUACACUCUC | 74.3% |
| 3198 | AAAAACCAAUUUAUAUGGA | 74.3% |
| 3199 | GCAGAGACAUAAGCGAUUU | 74.3% |
| 3200 | UAGAGCUCGAUGAAAUUGG | 74.3% |
| 3201 | UUUGUGAGCAUGGAGUUUU | 74.3% |
| 3202 | AGAGCUCGAUGAAAUUGGA | 74.3% |
| 3203 | GAUAGAGCUCGAUGAAAUU | 74.3% |
| 3204 | CUUGGUGAAAACAUGGCAC | 74.2% |
| 3205 | CAGAGACAUAAGCGAUUUG | 74.2% |
| 3206 | CAGAAGCAUGGCCCAUUGG | 74.2% |
| 3207 | AGGCAGACUACACUCUCGA | 74.2% |
| 3208 | UCAGAAGCAUGGCCCAUUG | 74.2% |
| 3209 | GAAGCAUGGCCCAUUGGGG | 74.2% |
| 3210 | AAGGCAGACUACACUCUCG | 74.2% |
| 3211 | AAGCAUGGCCCAUUGGGGA | 74.2% |
| 3212 | AAAAUUUGAAAUCUCAGGA | 74.1% |
| 3213 | AUAUUACCUUGAAAAGGCC | 74.1% |
| 3214 | AUCAGAAGCAUGGCCCAUU | 74.1% |
| 3215 | CUGGAUAGAGCUCGAUGAA | 74.1% |
| 3216 | GAUUUGUAUGAUUACAAGG | 74.1% |
| 3217 | AGAAGCAUGGCCCAUUGGG | 74.1% |
| 3218 | UGCAACACUACUGGAGCUG | 74.1% |
| 3219 | AUAUAUUACCUUGAAAAGG | 74.1% |
| 3220 | CCAGAUUUGUAUGAUUACA | 74.1% |
| 3221 | UAUUACCUUGAAAAGGCCA | 74.1% |
| 3222 | UUGGUGAAAACAUGGCACC | 74.1% |
| 3223 | GUGAAAACAUGGCACCAGA | 74.1% |
| 3224 | AUUUGUAUGAUUACAAGGA | 74.1% |
| 3225 | GAAAAAUUUGAAAUCUCAG | 74.1% |
| 3226 | AAAAAUUUGAAAUCUCAGG | 74.1% |
| 3227 | GGUGAAAACAUGGCACCAG | 74.1% |
| 3228 | CAUAUAUUACCUUGAAAAG | 74.1% |
| 3229 | UAUAUUACCUUGAAAAGGC | 74.1% |
| 3230 | CAGAUUUGUAUGAUUACAA | 74.1% |
| 3231 | GCUUCAACCCGAUGAUUGU | 74.0% |
| 3232 | ACAGUAUCUGCAACACUAC | 74.0% |
| 3233 | AACUCCUUCCUGACACAUG | 74.0% |
| 3234 | AACAGUAUCUGCAACACUA | 74.0% |
| 3235 | AGAUUUGUAUGAUUACAAG | 74.0% |
| 3236 | UAUAUAGUCAAACCACACG | 74.0% |
| 3237 | AUAUAGUCAAACCACACGA | 74.0% |
| 3238 | AGCAUGGCCCAUUGGGGAG | 74.0% |
| 3239 | GAAGAAAAAUUUGAAAUCU | 74.0% |
| 3240 | UGGUGAAAACAUGGCACCA | 74.0% |
| 3241 | CUGCAGAGACAUAAGCGAU | 74.0% |
| 3242 | UGCUUCAACCCGAUGAUUG | 74.0% |
| 3243 | AAGAAAAAUUUGAAAUCUC | 74.0% |
| 3244 | AGAAAAAUUUGAAAUCUCA | 74.0% |
| 3245 | ACUCCUUCCUGACACAUGC | 73.9% |
| 3246 | UUCAACUCCUUCCUGACAC | 73.9% |
| 3247 | GUUCAACUCCUUCCUGACA | 73.9% |
| 3248 | GCAUGGCCCAUUGGGGAGU | 73.9% |
| 3249 | UGAAAACAUGGCACCAGAG | 73.9% |
| 3250 | GUAAACAGUAUCUGCAACA | 73.9% |
| 3251 | AAAACAUGGCACCAGAGAA | 73.9% |
| 3252 | CAACUCCUUCCUGACACAU | 73.9% |
| 3253 | UCAACUCCUUCCUGACACA | 73.9% |
| 3254 | GGUUCAACUCCUUCCUGAC | 73.9% |
| 3255 | GAAAACAUGGCACCAGAGA | 73.9% |
| 3256 | UUGGUUCAACUCCUUCCUG | 73.8% |
| 3257 | UAAACAGUAUCUGCAACAC | 73.8% |
| 3258 | AAACAGUAUCUGCAACACU | 73.8% |
| 3259 | GUGCGACAAUGCUUCAACC | 73.8% |
| 3260 | CUUCAACCCGAUGAUUGUC | 73.8% |
| 3261 | CUCGACGAGGAAAGCAGGG | 73.8% |
| 3262 | AAUUUGAAAUCUCAGGAAC | 73.8% |
| 3263 | UCGACGAGGAAAGCAGGGC | 73.8% |
| 3264 | UGCGACAAUGCUUCAACCC | 73.8% |
| 3265 | AAAUUUGAAAUCUCAGGAA | 73.8% |
| 3266 | AAACAUGGCACCAGAGAAA | 73.8% |
| 3267 | CUCCUUCCUGACACAUGCA | 73.8% |
| 3268 | CUCUCGACGAGGAAAGCAG | 73.7% |
| 3269 | GCAGACUACACUCUCGACG | 73.7% |
| 3270 | ACUCUCGACGAGGAAAGCA | 73.7% |
| 3271 | UGUGCGACAAUGCUUCAAC | 73.7% |
| 3272 | CAGACUACACUCUCGACGA | 73.7% |
| 3273 | AACUGCAGAGACAUAAGCG | 73.7% |
| 3274 | AUAGUCAAACCACACGAAA | 73.7% |
| 3275 | ACUGCAGAGACAUAAGCGA | 73.7% |
| 3276 | UAUAGUCAAACCACACGAA | 73.6% |
| 3277 | CACUCUCGACGAGGAAAGC | 73.6% |
| 3278 | GGCAGACUACACUCUCGAC | 73.6% |
| 3279 | UACACUCUCGACGAGGAAA | 73.6% |
| 3280 | ACACUCUCGACGAGGAAAG | 73.6% |
| 3281 | ACAGAUUCAUCGAAAUUGG | 73.6% |
| 3282 | UGGGCUCUUGGUGAAAACA | 73.5% |
| 3283 | UGAAAUCUCAGGAACUAUG | 73.5% |
| 3284 | UAGUCAAACCACACGAAAA | 73.5% |
| 3285 | UCUUGGUGAAAACAUGGCA | 73.5% |
| 3286 | AUUACCUUGAAAAGGCCAA | 73.5% |
| 3287 | GAAAUCUCAGGAACUAUGC | 73.5% |
| 3288 | UCUCGACGAGGAAAGCAGG | 73.5% |
| 3289 | ACUGAGUACAUAAUGAAGG | 73.5% |
| 3290 | AACAGAUUCAUCGAAAUUG | 73.5% |
| 3291 | UUUGAAAUCUCAGGAACUA | 73.5% |
| 3292 | CUGAGUACAUAAUGAAGGG | 73.5% |
| 3293 | UUGAAAUCUCAGGAACUAU | 73.5% |
| 3294 | AUUUGAAAUCUCAGGAACU | 73.5% |
| 3295 | AUAAAUCAGAAGCAUGGCC | 73.3% |
| 3296 | GGCUCUUGGUGAAAACAUG | 73.3% |
| 3297 | CUACACUCUCGACGAGGAA | 73.3% |
| 3298 | UUACCUUGAAAAGGCCAAU | 73.3% |
| 3299 | GGGCUCUUGGUGAAAACAU | 73.3% |
| 3300 | GACUACACUCUCGACGAGG | 73.3% |
| 3301 | ACUACACUCUCGACGAGGA | 73.3% |
| 3302 | CUCUUGGUGAAAACAUGGC | 73.3% |
| 3303 | GCUCUUGGUGAAAACAUGG | 73.3% |
| 3304 | UGGUAGAACUUGAUGAUCC | 73.3% |
| 3305 | AUGAAGAAAACGAGUCAAC | 73.2% |
| 3306 | AGACUACACUCUCGACGAG | 73.2% |
| 3307 | ACAAGGAGAACAGAUUCAU | 73.2% |
| 3308 | CAAUGCUUCAACCCGAUGA | 73.2% |
| 3309 | GACAAUGCUUCAACCCGAU | 73.2% |
| 3310 | ACAAUGCUUCAACCCGAUG | 73.2% |
| 3311 | UGUUCAAUAGCCUGUAUGC | 73.2% |
| 3312 | AGUCAAACCACACGAAAAG | 73.2% |
| 3313 | UACAAGGAGAACAGAUUCA | 73.2% |
| 3314 | GUGUUCAAUAGCCUGUAUG | 73.2% |
| 3315 | AAUGCUUCAACCCGAUGAU | 73.2% |
| 3316 | GGUAGAACUUGAUGAUCCA | 73.2% |
| 3317 | AUGCUUCAACCCGAUGAUU | 73.2% |
| 3318 | UGAAGAAAACGAGUCAACU | 73.2% |
| 3319 | UAAAGUGGGCUCUUGGUGA | 73.1% |
| 3320 | AUUACAAGGAdAACAGAUU | 73.1% |
| 3321 | GUUCAAUAGCCUGUAUGCA | 73.1% |
| 3322 | AAUAAAUCAGAAGCAUGGC | 73.1% |
| 3323 | GAUUACAAGGAGAACAGAU | 73.1% |
| 3324 | UAAAUCAGAAGCAUGGCCC | 73.0% |
| 3325 | AUUUAUAUGGAUUCAUCAU | 73.0% |
| 3326 | UAUAUGGAUUCAUCAUAAA | 73.0% |
| 3327 | GCGACAAUGCUUCAACCCG | 73.0% |
| 3328 | AAUUUAUAUGGAUUCAUCA | 73.0% |
| 3329 | UUUAUAUGGAUUCAUCAUA | 73.0% |
| 3330 | UUAUAUGGAUUCAUCAUAA | 73.0% |
| 3331 | CGACAAUGCUUCAACCCGA | 73.0% |
| 3332 | UUACAAGGAGAACAGAUUC | 73.0% |
| 3333 | AUGAUUACAAGGAGAACAG | 72.9% |
| 3334 | UAUGAUUACAAGGAGAACA | 72.9% |
| 3335 | AGAAUAAAUCAGAAGCAUG | 72.9% |
| 3336 | CGAGAGCAUGAUUGAAGCC | 72.9% |
| 3337 | GAGAAUAAAUCAGAAGCAU | 72.9% |
| 3338 | GAAUAAAUCAGAAGCAUGG | 72.9% |
| 3339 | CUAAAGUGGGCUCUUGGUG | 72.9% |
| 3340 | UGAUUACAAGGAGAACAGA | 72.9% |
| 3341 | GCAACACUACUGGAGCUGA | 72.8% |
| 3342 | UGAGAAUAAAUCAGAAGCA | 72.8% |
| 3343 | AAAUUGAGCAUUGAAGACC | 72.8% |
| 3344 | AAAACAUUCUUUGGAUGGA | 72.8% |
| 3345 | CAACUAAAGUGGGCUCUUG | 72.8% |
| 3346 | ACUAAAGUGGGCUCUUGGU | 72.8% |
| 3347 | GUAUGAUUACAAGGAGAAC | 72.8% |
| 3348 | AACUAAAGUGGGCUCUUGG | 72.8% |
| 3349 | AAUUGAGCAUUGAAGACCC | 72.8% |
| 3350 | AAACAUUCUUUGGAUGGAA | 72.8% |
| 3351 | AUUGAGUACAUUGCAAGCA | 72.7% |
| 3352 | GUGGGCUCUUGGUGAAAAC | 72.7% |
| 3353 | UCAACUAAAGUGGGCUCUU | 72.7% |
| 3354 | AAUUGAGUACAUUGCAAGC | 72.7% |
| 3355 | GUCAACUAAAGUGGGCUCU | 72.7% |
| 3356 | AGUCAACUAAAGUGGGCUC | 72.7% |
| 3357 | CCAAUUGAGUACAUUGCAA | 72.7% |
| 3358 | CAAUUGAGUACAUUGCAAG | 72.7% |
| 3359 | UGUCAUGGAAGCAAGUAUU | 72.6% |
| 3360 | AGUGGGCUCUUGGUGAAAA | 72.6% |
| 3361 | AAGUGGGCUCUUGGUGAAA | 72.6% |
| 3362 | AGAACUAAAGAGGGAAGGC | 72.6% |
| 3363 | GAACUAAAGAGGGAAGGCG | 72.6% |
| 3364 | CUGUCAUGGAAGCAAGUAU | 72.5% |
| 3365 | UCGAUGAAAUUGGAGAGGA | 72.5% |
| 3366 | GCCUGCGAGCUAACUGAUU | 72.5% |
| 3367 | CUCGAUGAAAUUGGAGAGG | 72.5% |
| 3368 | UUGAGUACAUUGCAAGCAU | 72.5% |
| 3369 | CCUGCGAGCUAACUGAUUC | 72.5% |
| 3370 | CUGCGAGCUAACUGAUUCA | 72.5% |
| 3371 | UUGAGCAUUGAAGACCCAA | 72.4% |
| 3372 | AGGAGAACAGAUUCAUCGA | 72.4% |
| 3373 | CAAGGAGAACAGAUUCAUC | 72.4% |
| 3374 | CAGAUUCAUCGAAAUUGGA | 72.4% |
| 3375 | AUUUCAAGGCCUAUGUUCU | 72.4% |
| 3376 | UUUCAAGGCCUAUGUUCUU | 72.4% |
| 3377 | AAGGAGAACAGAUUCAUCG | 72.4% |
| 3378 | CCCCAAUUGAGUACAUUGC | 72.3% |
| 3379 | UGAGUACAUUGCAAGCAUG | 72.3% |
| 3380 | UGAGCAUUGAAGACCCAAG | 72.3% |
| 3381 | ACUUUGUGAGCAUGGAGUU | 72.3% |
| 3382 | GAGUACAUUGCAAGCAUGA | 72.3% |
| 3383 | AUGACACAGAUGUGGUAAA | 72.3% |
| 3384 | AAUGACACAGAUGUGGUAA | 72.3% |
| 3385 | UUCAACAAGGCCUGCGAGC | 72.3% |
| 3386 | GUCCAAAGAAGUGAAUGCC | 72.3% |
| 3387 | UUCAAGGCCUAUGUUCUUG | 72.3% |
| 3388 | UCAACAAGGCCUGCGAGCU | 72.3% |
| 3389 | AAACUUUGUGAGCAUGGAG | 72.3% |
| 3390 | AACUUUGUGAGCAUGGAGU | 72.3% |
| 3391 | GCCCCAAUUGAGUACAUUG | 72.3% |
| 3392 | AGUACAUUGCAAGCAUGAG | 72.3% |
| 3393 | CCCAAUUGAGUACAUUGCA | 72.3% |
| 3394 | UUUGUAUGAUUACAAGGAG | 72.3% |
| 3395 | GGCCUGCGAGCUAACUGAU | 72.2% |
| 3396 | AAGGCCUGCGAGCUAACUG | 72.2% |
| 3397 | AUUGAGCAUUGAAGACCCA | 72.2% |
| 3398 | GAGUUCAACAAGGCCUGCG | 72.2% |
| 3399 | GAGCAUUGAAGACCCAAGU | 72.2% |
| 3400 | UUGACAACUGCAGAGACAU | 72.2% |
| 3401 | GUUCAACAAGGCCUGCGAG | 72.2% |
| 3402 | AGUUCAACAAGGCCUGCGA | 72.2% |
| 3403 | UUUGACAACUGCAGAGACA | 72.2% |
| 3404 | GCUCGAUGAAAUUGGAGAG | 72.2% |
| 3405 | AGGCCUGCGAGCUAACUGA | 72.2% |
| 3406 | UGAGUUCAACAAGGCCUGC | 72.2% |
| 3407 | UCCUUCCUGACACAUGCAU | 72.1% |
| 3408 | AUGAGUUCAACAAGGCCUG | 72.1% |
| 3409 | AAUGAGUUCAACAAGGCCU | 72.1% |
| 3410 | CCUUCCUGACACAUGCAUU | 72.1% |
| 3411 | AACAAGGCCUGCGAGCUAA | 72.0% |
| 3412 | CUUCCUGACACAUGCAUUA | 72.0% |
| 3413 | CAAGGCCUGCGAGCUAACU | 72.0% |
| 3414 | GGAGAACAGAUUCAUCGAA | 72.0% |
| 3415 | CAACAAGGCCUGCGAGCUA | 72.0% |
| 3416 | ACAAGGCCUGCGAGCUAAC | 72.0% |
| 3417 | ACAACUGCAGAGACAUAAG | 71.9% |
| 3418 | GAGAACAGAUUCAUCGAAA | 71.9% |
| 3419 | GAACAGAUUCAUCGAAAUU | 71.9% |
| 3420 | UGACAACUGCAGAGACAUA | 71.9% |
| 3421 | CUAAAGAGGGAAGGCGAAA | 71.9% |
| 3422 | GACAACUGCAGAGACAUAA | 71.9% |
| 3423 | UUCCUGACACAUGCAUUAA | 71.9% |
| 3424 | AGAACAGAUUCAUCGAAAU | 71.9% |
| 3425 | ACUAAAGAGGGAAGGCGAA | 71.9% |
| 3426 | GAAUGAGUUCAACAAGGCC | 71.9% |
| 3427 | GACUUUGACAACUGCAGAG | 71.7% |
| 3428 | CUUUGACAACUGCAGAGAC | 71.7% |
| 3429 | AGGAAUGACACAGAUGUGG | 71.7% |
| 3430 | GAAUGACACAGAUGUGGUA | 71.7% |
| 3431 | CAACUGCAGAGACAUAAGC | 71.7% |
| 3432 | GGAAUGACACAGAUGUGGU | 71.7% |
| 3433 | GAAGAAAACGAGUCAACUA | 71.7% |
| 3434 | AAGAAAACGAGUCAACUAA | 71.7% |
| 3435 | ACUUUGACAACUGCAGAGA | 71.7% |
| 3436 | AACGAGUCAACUAAAGUGG | 71.6% |
| 3437 | UCCUGACACAUGCAUUAAA | 71.6% |
| 3438 | CGAGGAAAGCAGGGCUAGG | 71.6% |
| 3439 | GGACAAACGGAACAUCAAA | 71.6% |
| 3440 | AGGACAAACGGAACAUCAA | 71.6% |
| 3441 | ACGAGUCAACUAAAGUGGG | 71.6% |
| 3442 | ACGAGGAAAGCAGGGCUAG | 71.6% |
| 3443 | ACACAUGCAUUAAAAUAGU | 71.6% |
| 3444 | CCUGACACAUGCAUUAAAA | 71.6% |
| 3445 | UGACACAUGCAUUAAAAUA | 71.5% |
| 3446 | GACAAACGGAACAUCAAAG | 71.5% |
| 3447 | UAGUAAACAGUAUCUGCAA | 71.5% |
| 3448 | GUAGUAAACAGUAUCUGCA | 71.5% |
| 3449 | AACUAAAGAGGGAAGGCGA | 71.5% |
| 3450 | AGAAAACGAGUCAACUAAA | 71.5% |
| 3451 | GACGAGGAAAGCAGGGCUA | 71.5% |
| 3452 | CACAUGCAUUAAAAUAGUU | 71.5% |
| 3453 | AAAACGAGUCAACUAAAGU | 71.4% |
| 3454 | UAAGGAAUGACACAGAUGU | 71.4% |
| 3455 | CCACUGAGUACAUAAUGAA | 71.4% |
| 3456 | CGAGUCAACUAAAGUGGGC | 71.4% |
| 3457 | AAACGAGUCAACUAAAGUG | 71.4% |
| 3458 | CUGACACAUGCAUUAAAAU | 71.4% |
| 3459 | GCCACUGAGUACAUAAUGA | 71.4% |
| 3460 | GUACAUUGCAAGCAUGAGG | 71.4% |
| 3461 | CUUUGUGAGCAUGGAGUUU | 71.3% |
| 3462 | UGAGGACAAACGGAACAUC | 71.3% |
| 3463 | GAGGACAAACGGAACAUCA | 71.3% |
| 3464 | AAGGAAUGACACAGAUGUG | 71.3% |
| 3465 | UUAAGGAAUGACACAGAUG | 71.3% |
| 3466 | AGUAAACAGUAUCUGCAAC | 71.3% |
| 3467 | CAUGAAGAAAACGAGUCAA | 71.2% |
| 3468 | CACUGAGUACAUAAUGAAG | 71.2% |
| 3469 | CAGUAGUAAACAGUAUCUG | 71.2% |
| 3470 | GACAGUAGUAAACAGUAUC | 71.2% |
| 3471 | AGUAGUAAACAGUAUCUGC | 71.2% |
| 3472 | CAAUGGACGAUUUUCAACU | 71.2% |
| 3473 | ACAGUAGUAAACAGUAUCU | 71.2% |
| 3474 | GCAAUGGACGAUUUUCAAC | 71.2% |
| 3475 | GACACAUGCAUUAAAAUAG | 71.1% |
| 3476 | GUCAUGGAAGCAAGUAUUG | 71.1% |
| 3477 | AAAGUGGGCUCUUGGUGAA | 71.1% |
| 3478 | UAUGUGAGGACAAACGGAA | 71.0% |
| 3479 | GUGAGGACAAACGGAACAU | 71.0% |
| 3480 | UCCUCCUGAUGGAUGCUUU | 71.0% |
| 3481 | CGACGAGGAAAGCAGGGCU | 71.0% |
| 3482 | UUCCUCCUGAUGGAUGCUU | 71.0% |
| 3483 | UGUGAGGACAAACGGAACA | 71.0% |
| 3484 | AUGUGAGGACAAACGGAAC | 71.0% |
| 3485 | UUGUAUGUGAGGACAAACG | 70.9% |
| 3486 | UGUAUGUGAGGACAAACGG | 70.9% |
| 3487 | GUAUGUGAGGACAAACGGA | 70.9% |
| 3488 | AGUAUCUGCAACACUACUG | 70.8% |
| 3489 | GAGCCACUGAGUACAUAAU | 70.8% |
| 3490 | AGCCACUGAGUACAUAAUG | 70.8% |
| 3491 | AGAGCCACUGAGUACAUAA | 70.8% |
| 3492 | CAGUAUCUGCAACACUACU | 70.8% |
| 3493 | GUAUCUGCAACACUACUGG | 70.8% |
| 3494 | GAAAACGAGUCAACUAAAG | 70.7% |
| 3495 | UUCAUCGAAAUUGGAGUGA | 70.7% |
| 3496 | AGACUUUGACAACUGCAGA | 70.7% |
| 3497 | AGUAGACUUUGACAACUGC | 70.7% |
| 3498 | GGAAGCAAGUAUUGUCAGA | 70.7% |
| 3499 | UAGACUUUGACAACUGCAG | 70.7% |
| 3500 | GUAGACUUUGACAACUGCA | 70.7% |
| 3501 | UGGAAGCAAGUAUUGUCAG | 70.7% |
| 3502 | CUUGUAUGUGAGGACAAAC | 70.7% |
| 3503 | CAUCGAAAUUGGAGUGACA | 70.7% |
| 3504 | UCAUGGAAGCAAGUAUUGU | 70.7% |
| 3505 | AUUCAUCGAAAUUGGAGUG | 70.7% |
| 3506 | UCAUCGAAAUUGGAGUGAC | 70.7% |
| 3507 | CAAGUCACGAAGGAGAAGG | 70.6% |
| 3508 | UCAUCAUAAAAGGAAGAUC | 70.6% |
| 3509 | UGGACGAUUUUCAACUAAU | 70.6% |
| 3510 | UCCAAAUUCCUCCUGAUGG | 70.6% |
| 3511 | AGUCACGAAGGAGAAGGGA | 70.6% |
| 3512 | CAAAUUCCUCCUGAUGGAU | 70.6% |
| 3513 | CCAAAUUCCUCCUGAUGGA | 70.6% |
| 3514 | AAUGGACGAUUUUCAACUA | 70.6% |
| 3515 | CCAAGUCACGAAGGAGAAG | 70.6% |
| 3516 | AUGGACGAUUUUCAACUAA | 70.6% |
| 3517 | AAUUCCUCCUGAUGGAUGC | 70.6% |
| 3518 | UUCAUCAUAAAAGGAAGAU | 70.6% |
| 3519 | GUCACGAAGGAGAAGGGAU | 70.6% |
| 3520 | AAAUUCCUCCUGAUGGAUG | 70.6% |
| 3521 | CAUGGAAGCAAGUAUUGUC | 70.6% |
| 3522 | AUGGAAGCAAGUAUUGUCA | 70.6% |
| 3523 | GGAAAGCAGGGCUAGGAUU | 70.6% |
| 3524 | AAAUCUCAGGAACUAUGCG | 70.5% |
| 3525 | CCCAAGUCACGAAGGAGAA | 70.5% |
| 3526 | GAUUGAAGCCGAGUCCUCG | 70.4% |
| 3527 | CGAUGAAAUUGGAGAGGAC | 70.1% |
| 3528 | AUUCCUCCUGAUGGAUGCU | 70.1% |
| 3529 | GUCCAAAUUCCUCCUGAUG | 70.1% |
| 3530 | GGUCCAAAUUCCUCCUGAU | 70.1% |
| 3531 | UGAGCAUGGAGUUUUCUCU | 70.0% |
| 3532 | UCAUAAAAGGAAGAUCUCA | 70.0% |
| 3533 | AAGAAGUGCCAUAGGCCAA | 70.0% |
| 3534 | CGGUCCAAAUUCCUCCUGA | 70.0% |
| 3535 | AUCAUAAAAGGAAGAUCUC | 70.0% |
| 3536 | UGUGAGCAUGGAGUUUUCU | 70.0% |

TABLE 2-4

Conserved 19-mer sequences that are present
in at least 70% of the Influenza A segment
2 (HA) sequences listed in Table 1-4.

| Seq | | |
|---|---|---|
| ID | Sequence Percent | |
| 3537 | GCAUCACUCCAAAUGGAAG | 70.4% |
| 3538 | UGCAUCACUCCAAAUGGAA | 70.4% |
| 3539 | AUGCAUCACUCCAAAUGGA | 70.4% |
| 3540 | AAUGCAUCACUCCAAAUGG | 70.3% |
| 3541 | GAAUGCAUCACUCCAAAUG | 70.3% |
| 3542 | UCACUCCAAAUGGAAGCAU | 70.3% |
| 3543 | UGUUACCCUUAUGAUGUGC | 70.2% |
| 3544 | CAUCACUCCAAAUGGAAGC | 70.2% |
| 3545 | AUCACUCCAAAUGGAAGCA | 70.2% |

TABLE 2-5

Conserved 19-mer sequences that are present
in at least 70% of the Influenza A segment
2 (NP) sequences listed in Table 1-5.

| Seq | | |
|---|---|---|
| ID | Sequence Percent | |
| 3546 | UCUUAUUUCUUCGGAGACA | 98.0% |
| 3547 | AUUUCUUCGGAGACAAUGC | 97.9% |
| 3548 | UAUUUCUUCGGAGACAAUG | 97.9% |
| 3549 | UUAUUUCUUCGGAGACAAU | 97.9% |
| 3550 | CUUAUUUCUUCGGAGACAA | 97.9% |
| 3551 | UUUCUUCGGAGACAAUGCA | 97.8% |
| 3552 | AUGAAGGAUCUUAUUUCUU | 97.6% |
| 3553 | AAUGAAGGAUCUUAUUUCU | 97.6% |
| 3554 | GAAGGAUCUUAUUUCUUCG | 97.5% |
| 3555 | AAGGAUCUUAUUUCUUCGG | 97.5% |
| 3556 | UGAAGGAUCUUAUUUCUUC | 97.4% |
| 3557 | UAAUGAAGGAUCUUAUUUC | 97.3% |
| 3558 | UUCUUCGGAGACAAUGCAG | 96.5% |
| 3559 | UCUUCGGAGACAAUGCAGA | 96.4% |
| 3560 | GAUCUUAUUUCUUCGGAGA | 96.0% |
| 3561 | GGAUCUUAUUUCUUCGGAG | 96.0% |
| 3562 | AUCUUAUUUCUUCGGAGAC | 96.0% |
| 3563 | AGGAUCUUAUUUCUUCGGA | 95.8% |
| 3564 | AGUAAUGAAGGAUCUUAUU | 95.4% |
| 3565 | GUAAUGAAGGAUCUUAUUU | 95.4% |
| 3566 | AUGAGUAAUGAAGGAUCUU | 95.3% |
| 3567 | UGAGUAAUGAAGGAUCUUA | 95.3% |
| 3568 | GAGUAAUGAAGGAUCUUAU | 95.3% |
| 3569 | UACAAAUUGCUUCAAAUGA | 93.7% |
| 3570 | AAUUUCAAACAGCUGCACA | 93.5% |
| 3571 | AAAUUUCAAACAGCUGCAC | 93.5% |
| 3572 | GUACAAAUUGCUUCAAAUG | 93.4% |
| 3573 | AUGGUGCUCUCUGCUUUUG | 93.3% |
| 3574 | UGGUGCUCUCUGCUUUUGA | 93.3% |
| 3575 | CAAGGCACCAAACGGUCUU | 93.2% |
| 3576 | AAGGCACCAAACGGUCUUA | 93.2% |
| 3577 | AGAGAAUGUGCAACAUUCU | 93.0% |
| 3578 | GAGAGAAUGUGCAACAUUC | 93.0% |
| 3579 | AUUUCAAACAGCUGCACAA | 92.7% |
| 3580 | UUUCAAACAGCUGCACAAA | 92.7% |
| 3581 | GGAACCCAGGAAAUGCUGA | 92.2% |
| 3582 | CGAACCCGAUCGUGCCCUC | 92.1% |
| 3583 | CGGAACCCAGGAAAUGCUG | 92.1% |
| 3584 | AAUGCUGAGAUCGAAGAUC | 91.7% |
| 3585 | AUGCUGAGAUCGAAGAUCU | 91.7% |
| 3586 | GAUUCUACAUCCAAAUGUG | 91.6% |
| 3587 | GCUGAGAUCGAAGAUCUCA | 91.5% |
| 3588 | UCAUGGCAGCAUUCACUGG | 91.5% |
| 3589 | AAUGGUGCUCUCUGCUUUU | 91.5% |
| 3590 | ACCCAGGAAAUGCUGAGAU | 91.4% |
| 3591 | UCAGACAUGAGGGCAGAAA | 91.4% |
| 3592 | UGCUGAGAUCGAAGAUCUC | 91.4% |
| 3593 | CAGACAUGAGGGCAGAAAU | 91.4% |
| 3594 | AACCCAGGAAAUGCUGAGA | 91.4% |
| 3595 | AAAUGCUGAGAUCGAAGAU | 91.2% |
| 3596 | GAAAUGCUGAGAUCGAAGA | 91.2% |
| 3597 | GAACCCAGGAAAUGCUGAG | 91.2% |
| 3598 | CCAGGAAAUGCUGAGAUCG | 91.1% |
| 3599 | AGGAAAUGCUGAGAUCGAA | 91.1% |
| 3600 | CAGGAAAUGCUGAGAUCGA | 91.1% |
| 3601 | GGAAAUGCUGAGAUCGAAG | 91.1% |
| 3602 | UGGAUCAAGUGAGAGAAAG | 90.7% |
| 3603 | UAUGAGAGAAUGUGCAACA | 90.4% |
| 3604 | AUGAGAGAAUGUGCAACAU | 90.4% |
| 3605 | GAAAAUUUCAAACAGCUGC | 90.1% |
| 3606 | GGAAAAUUUCAAACAGCUG | 90.1% |
| 3607 | AAAGGAAAAUUUCAAACAG | 90.0% |
| 3608 | AGGAAAAUUUCAAACAGCU | 90.0% |
| 3609 | AAGGAAAAUUUCAAACAGC | 90.0% |
| 3610 | CCCAGGAAAUGCUGAGAUC | 90.0% |
| 3611 | AAAAUUUCAAACAGCUGCA | 89.7% |
| 3612 | CUUAUGAACAGAUGGAAAC | 89.5% |
| 3613 | UCUUAUGAACAGAUGGAAA | 89.5% |
| 3614 | UAUGAACAGAUGGAAACUG | 89.5% |
| 3615 | AGGGAACUCGUCCUUUAUG | 89.5% |
| 3616 | GGGAACUCGUCCUUUAUGA | 89.5% |
| 3617 | UUAUGAACAGAUGGAAACU | 89.1% |
| 3618 | AUUCUGCUGCAUUUGAAGA | 89.0% |
| 3619 | UGAGGGAACUCGUCCUUUA | 88.8% |
| 3620 | GAGGGAACUCGUCCUUUAU | 88.7% |
| 3621 | UUCUGCUGCAUUUGAAGAU | 88.6% |
| 3622 | GAGGAAACACUAAUCAACA | 88.2% |
| 3623 | GGAGGAAACACUAAUCAAC | 88.2% |
| 3624 | AGUGGAGGAAACACUAAUC | 88.2% |
| 3625 | GUGGAGGAAACACUAAUCA | 88.1% |
| 3626 | UGGAGGAAACACUAAUCAA | 88.1% |
| 3627 | GAGGGUCAGUUGCUCACAA | 87.8% |
| 3628 | AGAGGGUCAGUUGCUCACA | 87.8% |
| 3629 | CAGCUGGUGUGGAUGGCAU | 87.6% |
| 3630 | AGCUGGUGUGGAUGGCAUG | 87.6% |
| 3631 | GCUGGUGUGGAUGGCAUGC | 87.5% |
| 3632 | ACUUCGAAAAAGAGGGAUA | 87.4% |
| 3633 | CAACGAACCCGAUCGUGCC | 87.2% |
| 3634 | GCAACGAACCCGAUCGUGC | 87.2% |
| 3635 | AUGAGGGCAGAAAUCAUAA | 87.2% |
| 3636 | UCAGCUGGUGUGGAUGGCA | 87.1% |
| 3637 | GUCAGCUGGUGUGGAUGGC | 87.1% |
| 3638 | GGCAACGAACCCGAUCGUG | 87.1% |
| 3639 | AGUCAGCUGGUGUGGAUGG | 87.1% |
| 3640 | UUCAAACAGCUGCACAAAG | 87.0% |
| 3641 | UUCUACAUCCAAAUGUGCA | 86.9% |
| 3642 | UCUACAUCCAAAUGUGCAC | 86.9% |
| 3643 | CAUGAGGGCAGAAAUCAUA | 86.8% |
| 3644 | ACAUGAGGGCAGAAAUCAU | 86.8% |
| 3645 | GACAUGAGGGCAGAAAUCA | 86.8% |
| 3646 | GAGUACAAAUUGCUUCAAA | 86.7% |
| 3647 | GCACACAAGAGUCAGCUGG | 86.7% |
| 3648 | GAGAAUCCAGCACACAAGA | 86.7% |
| 3649 | CACACAAGAGUCAGCUGGU | 86.7% |
| 3650 | GGAGUACAAAUUGCUUCAA | 86.7% |
| 3651 | AGAAUCCAGCACACAAGAG | 86.7% |
| 3652 | CAGCACACAAGAGUCAGCU | 86.6% |
| 3653 | AGUACAAAUUGCUUCAAAU | 86.6% |
| 3654 | CCAGCACACAAGAGUCAGC | 86.6% |
| 3655 | AUUCUACAUCCAAAUGUGC | 86.6% |
| 3656 | ACAAGAGUCAGCUGGUGUG | 86.5% |
| 3657 | AGCACACAAGAGUCAGCUG | 86.5% |
| 3658 | UGCUUAUGAGAGAAUGUGC | 86.5% |
| 3659 | CAAGAGUCAGCUGGUGUGG | 86.5% |
| 3660 | AGAGUCAGCUGGUGUGGAU | 86.5% |
| 3661 | GAGUCAGCUGGUGUGGAUG | 86.5% |
| 3662 | CACAAGAGUCAGCUGGUGU | 86.5% |
| 3663 | GCUUAUGAGAGAAUGUGCA | 86.5% |
| 3664 | CUOAUGAGAGAAUGUGCAA | 86.5% |
| 3665 | AAGAGUCAGCUGGUGUGGA | 86.5% |
| 3666 | CCAAACGGUCUUAUGAACA | 86.4% |
| 3667 | GGCACCAAACGGUCUUAUG | 86.4% |
| 3668 | GCACCAAACGGUCUUAUGA | 86.4% |
| 3669 | ACCAAACGGUCUUAUGAAC | 86.4% |
| 3670 | AGGCACCAAACGGUCUUAU | 86.4% |
| 3671 | UGAGAGAAUGUGCAACAUU | 86.4% |
| 3672 | AAUCCAGCACACAAGAGUC | 86.3% |
| 3673 | ACACAAGAGUCAGCUGGUG | 86.3% |
| 3674 | AUCCAGCACACAAGAGUCA | 86.3% |
| 3675 | CACCAAACGGUCUUAUGAA | 86.3% |
| 3676 | AGACAUGAGGGCAGAAAUC | 86.2% |
| 3677 | GACUUCGAAAAAGAGGGAU | 86.2% |
| 3678 | GAAUCCAGCACACAAGAGU | 86.2% |
| 3679 | CAGAGGACAAGAGCUCUUG | 86.1% |
| 3680 | CGGUCUUAUGAACAGAUGG | 86.1% |
| 3681 | AGAGGACAAGAGCUCUUGU | 86.1% |
| 3682 | ACGGUCUUAUGAACAGAUG | 86.1% |
| 3683 | UACGACUUCGAAAAAGAGG | 86.1% |
| 3684 | GGUCUUAUGAACAGAUGGA | 86.1% |
| 3685 | ACGACUUCGAAAAAGAGGG | 86.1% |
| 3686 | AACGGUCUUAUGAACAGAU | 86.0% |
| 3687 | AAACGGUCUUAUGAACAGA | 86.0% |
| 3688 | CAAACGGUCUUAUGAACAG | 86.0% |
| 3689 | UUAUGAGAGAAUGUGCAAC | 86.0% |
| 3690 | CGACUUCGAAAAAGAGGGA | 85.8% |
| 3691 | UCCAGCACACAAGAGUCAG | 85.7% |
| 3692 | AUGAACAGAUGGAAACUGA | 85.7% |
| 3693 | UGAACAGAUGGAAACUGAU | 85.6% |
| 3694 | AACAGAUGGAAACUGAUGG | 85.6% |
| 3695 | GUCUUAUGAACAGAUGGAA | 85.6% |
| 3696 | CUGAGAUCGAAGAUCUCAU | 85.6% |
| 3697 | GAACAGAUGGAAACUGAUG | 85.6% |
| 3698 | GGAAACACUAAUCAACAGA | 85.5% |
| 3699 | ACGAGAAUCCAGCACACAA | 85.4% |
| 3700 | AACGAGAAUCCAGCACACA | 85.4% |
| 3701 | ACACUAAUCAACAGAGGGC | 85.1% |
| 3702 | CGAGAAUCCAGCACACAAG | 85.1% |
| 3703 | AACACUAAUCAACAGAGGG | 85.1% |
| 3704 | AGGAAACACUAAUCAACAG | 85.1% |
| 3705 | GAAACACUAAUCAACAGAG | 85.0% |
| 3706 | AGGAGUACAAAUUGCUUCA | 85.0% |
| 3707 | GAGGAGUACAAAUUGCUUC | 85.0% |
| 3708 | AGAGGAGUACAAAUUGCUU | 85.0% |
| 3709 | AAACACUAAUCAACAGAGG | 85.0% |
| 3710 | UAUUGAGAGGGUCAGUUGC | 84.9% |
| 3711 | AACCCGAUCGUGCCCUCUU | 84.6% |
| 3712 | CCCGAUCGUGCCCUCUUUU | 84.6% |
| 3713 | GAACCCGAUCGUGCCCUCU | 84.6% |
| 3714 | ACCCGAUCGUGCCCUCUUU | 84.6% |
| 3715 | CGAUCGUGCCCUCUUUUGA | 84.5% |
| 3716 | CCGAUCGUGCCCUCUUUUG | 84.5% |
| 3717 | Ct3AGAGGAGUACAAAUUGC | 84.2% |
| 3718 | ACUAGAGGAGUACAAAUUG | 84.1% |
| 3719 | UAGAGGAGUACAAAUUGCU | 84.1% |
| 3720 | AGAUGGAAACUGAUGGGGA | 84.0% |
| 3721 | CAGAUGGAAACUGAUGGGG | 84.0% |
| 3722 | AGUGGGUACGACUUCGAAA | 84.0% |
| 3723 | ACAGAUGGAAACUGAUGGG | 84.0% |
| 3724 | CUAAUCAACAGAGGGCCUC | 84.0% |
| 3725 | ACUAAUCAACAGAGGGCCU | 84.0% |
| 3726 | CAGUGGGUACGACUUCGAA | 83.9% |
| 3727 | CCAGUGGGUACGACUUCGA | 83.9% |
| 3728 | UGAUGGAAGGUGCAAAACC | 83.8% |
| 3729 | AAGAAGAAAUAAGGCGAAU | 83.8% |
| 3730 | GUGGGUACGACUUCGAAAA | 83.8% |
| 3731 | AAAGAAGAAAUAAGGCGAA | 83.8% |
| 3732 | GAUGGAAGGUGCAAAACCA | 83.7% |
| 3733 | UGUGCUCUCUGAUGCAGGG | 83.7% |
| 3734 | AUAUUGAGAGGGUCAGUUG | 83.7% |
| 3735 | AUGUGCUCUCUGAUGCAGG | 83.7% |
| 3736 | AUGGAAGGUGCAAAACCAG | 83.7% |
| 3737 | UGGAAGGUGCAAAACCAGA | 83.7% |
| 3738 | CACUAAUCAACAGAGGGCC | 83.6% |
| 3739 | AUGAUGGAAGGUGCAAAAC | 83.6% |
| 3740 | ACCAGAGGACAAGAGCUCU | 83.5% |
| 3741 | UACCAGAGGACAAGAGCUC | 83.5% |
| 3742 | AGAUGAUUGAUGGAAUUGG | 83.2% |
| 3743 | CCAGAGGACAAGAGCUCUU | 83.2% |
| 3744 | AAGAUGAUUGAUGGAAUUG | 83.2% |
| 3745 | GAAAUAAGGCGAAUCUGGC | 83.0% |
| 3746 | AAAUAAGGCGAAUCUGGCG | 83.0% |
| 3747 | GAGAGGGUCAGUUGCUCAC | 83.0% |
| 3748 | UGAGAGGGUCAGUUGCUCA | 83.0% |
| 3749 | CUGAACUUAAACUCAGUGA | 82.9% |
| 3750 | UGAACUUAAACUCAGUGAU | 82.9% |
| 3751 | UUGAGAGGGUCAGUUGCUC | 82.9% |
| 3752 | ACUGAACUUAAACUCAGUG | 82.9% |
| 3753 | CAAACAGCUGCACAAAGAG | 82.8% |
| 3754 | AUUGAGAGGGUCAGUUGCU | 82.8% |
| 3755 | AAACAGCUGCACAAAGAGC | 82.8% |
| 3756 | UCAGUUGCUCACAAAUCUU | 82.8% |
| 3757 | UGGGUACGACUUCGAAAAA | 82.7% |
| 3758 | CAGUUGCUCACAAAUCUUG | 82.7% |
| 3759 | GGGUACGACUUCGAAAAAG | 82.7% |
| 3760 | GGUACGACUUCGAAAAAGA | 82.7% |
| 3761 | UCAAACAGCUGCACAAAGA | 82.7% |
| 3762 | GUACGACUUCGAAAAAGAG | 82.6% |
| 3763 | GAUGAGGGAACUCGUCCUU | 82.5% |
| 3764 | UGGAUGAGGGAACUCGUCC | 82.5% |
| 3765 | GGAUGAGGGAACUCGUCCU | 82.5% |
| 3766 | CAGCUGCACAAAGAGCAAU | 82.5% |
| 3767 | AUGAGGGAACUCGUCCUUU | 82.5% |
| 3768 | AGCUGCACAAAGAGCAAUG | 82.5% |
| 3769 | ACAGCUGCACAAAGAGCAA | 82.4% |
| 3770 | AACAGCUGCACAAAGAGCA | 82.4% |
| 3771 | UAAGCUUCAUCAGAGGGAC | 82.2% |
| 3772 | AGAAAUAAGGCGAAUCUGG | 82.2% |
| 3773 | GAAGAAAUAAGGCGAAUCU | 82.1% |
| 3774 | AAGAAAUAAGGCGAAUCUG | 82.1% |
| 3775 | UUAAGCUUCAUCAGAGGGA | 82.1% |
| 3776 | GGGAAGAUGAUUGAUGGAA | 82.1% |
| 3777 | ACGAACCCGAUCGUGCCCU | 82.1% |
| 3778 | GGAAGAUGAUUGAUGGAAU | 82.1% |
| 3779 | AACGAACCCGAUCGUGCCC | 82.1% |
| 3780 | GCCAGAAUGCAACUGAGAU | 82.1% |
| 3781 | AGAAGAAAUAAGGCGAAUC | 82.1% |
| 3782 | CGCCAGAAUGCAACUGAGA | 82.1% |
| 3783 | GUGCUCUCUGCUUUUGAUG | 81.7% |
| 3784 | GGUGCUCUCUGCUUUUGAU | 81.7% |
| 3785 | UGCUCUCUGCUUUUGAUGA | 81.7% |
| 3786 | GAAGAUGAUUGAUGGAAUU | 81.6% |
| 3787 | AUCCGUCGGGAAGAUGAUU | 81.5% |
| 3788 | CAUCCGUCGGGAAGAUGAU | 81.5% |
| 3789 | UCGGGAAGAUGAUUGAUGG | 81.4% |
| 3790 | CGGGAAGAUGAUUGAUGGA | 81.4% |
| 3791 | AAGGCAACGAACCCGAUCG | 81.3% |
| 3792 | AGGCAACGAACCCGAUCGU | 81.3% |
| 3793 | GGUCAGUUGCUCACAAAUC | 81.2% |
| 3794 | GGGUCAGUUGCUCACAAAU | 81.2% |
| 3795 | GUCGGGAAGAUGAUUGAUG | 81.1% |
| 3796 | AGGGUCAGUUGCUCACAAA | 81.1% |
| 3797 | UCCGUCGGGAAGAUGAUUG | 81.1% |
| 3798 | AAAGAAACCUCCCAUUUGA | 81.0% |
| 3799 | CGUCGGGAAGAUGAUUGAU | 81.0% |
| 3800 | CAAAGAAACCUCCCAUUUG | 81.0% |
| 3801 | CCGUCGGGAAGAUGAUUGA | 81.0% |
| 3802 | UGAGGGCAGAAAUCAUAAG | 80.7% |
| 3803 | GGAAUAGACCCUUUCAAAC | 80.6% |
| 3804 | GAAUAGACCCUUUCAAACU | 80.6% |
| 3805 | GUGGGAAUAGACCCUUUCA | 80.5% |
| 3806 | UGGGAAUAGACCCUUUCAA | 80.5% |
| 3807 | GUCAGUUGCUCACAAAUCU | 80.4% |
| 3808 | GGGAAUAGACCCUUUCAAA | 80.3% |
| 3809 | GGACAAGAGCUCUUGUUCG | 79.1% |
| 3810 | AGGACAAGAGCUCUUGUUC | 79.1% |
| 3812 | UCUGGAGAGGUGAGAAUGG | 78.9% |
| 3812 | UUCUGGAGAGGUGAGAAUG | 78.9% |
| 3813 | CCCAGCGCGGGGAAAGAUC | 78.9% |
| 3814 | CCAGCGCGGGGAAAGAUCC | 78.9% |
| 3815 | UACUGGGCCAUAAGGACCA | 78.8% |
| 3816 | ACUGGGCCAUAAGGACCAG | 78.7% |
| 3817 | GAGGACAAGAGCUCUUGUU | 78.3% |
| 3818 | AUGGCGUCCCAAGGCACCA | 77.8% |
| 3819 | UGGCGUCCCAAGGCACCAA | 77.7% |
| 3820 | CGUCCCAAGGCACCAAACG | 77.7% |
| 3821 | GGCGUCCCAAGGCACCAAA | 77.7% |
| 3822 | GCGUCCCAAGGCACCAAAC | 77.7% |
| 3823 | UGUGCACUGAACUUAAACU | 77.4% |
| 3824 | GUGCACUGAACUUAAACUC | 77.4% |
| 3825 | AUGUGCACUGAACUUAAAC | 77.4% |
| 3826 | CCAAGGCACCAAACGGUCU | 77.4% |
| 3827 | CACUGAACUUAAACUCAGU | 77.3% |
| 3828 | UGCACUGAACUUAAACUCA | 77.3% |
| 3829 | GCACUGAACUUAAACUCAG | 77.3% |
| 3830 | CCCAAGGCACCAAACGGUC | 77.2% |
| 3831 | UCCCAAGGCACCAAACGGU | 77.1% |
| 3832 | AGAUCGAAGAUCUCAUAUU | 76.9% |
| 3833 | GAGAUCGAAGAUCUCAUAU | 76.9% |
| 3834 | UGAGAUCGAAGAUCUCAUA | 76.9% |
| 3835 | GUCCCAAGGCACCAAACGG | 76.9% |
| 3836 | GUACUGGGCCAUAAGGACC | 76.8% |
| 3837 | UGGUGUGGAUGGCAUGCCA | 76.6% |
| 3838 | GUGCUUAUGAGAGAAUGUG | 76.4% |
| 3839 | GGUACUGGGCCAUAAGGAC | 76.3% |
| 3840 | GUGUGGAUGGCAUGCCAUU | 76.1% |
| 3841 | UGUGGAUGGCAUGCCAUUC | 76.1% |
| 3842 | GGUGUGGAUGGCAUGCCAU | 76.1% |
| 3843 | CAUACCAGAGGACAAGAGC | 76.1% |
| 3844 | CAACAUACCAGAGGACAAG | 76.1% |
| 3845 | ACAUACCAGAGGACAAGAG | 76.1% |
| 3846 | CUGGUGUGGAUGGCAUGCC | 76.0% |
| 3847 | AACAUACCAGAGGACAAGA | 75.9% |
| 3848 | AUACCAGAGGACAAGAGCU | 75.9% |
| 3849 | ACAUCCAAAUGUGCACUGA | 75.8% |
| 3850 | UACAUCCAAAUGUGCACUG | 75.8% |
| 3851 | CUACAUCCAAAUGUGCACU | 75.8% |
| 3852 | GAUCGAAGAUCUCAUAUUU | 75.8% |
| 3853 | AUCCAAAUGUGCACUGAAC | 75.4% |
| 3854 | CCUUUCAAACUACUUCAAA | 75.4% |
| 3855 | UCCAAAUGUGCACUGAACU | 75.4% |
| 3856 | CAUCCAAAUGUGCACUGAA | 75.4% |
| 3857 | CAAAUGUGCACUGAACUUA | 75.3% |
| 3858 | AAAUGUGCACUGAACUUAA | 75.3% |
| 3859 | CUUUCAAACUACUUCAAAA | 75.2% |
| 3860 | AAUGUGCACUGAACUUAAA | 75.1% |
| 3861 | UACUCUUGAACUGAGAAGC | 75.1% |
| 3862 | GUGACAUCAAAAUCAUGGC | 75.1% |
| 3863 | UGACAUCAAAAUCAUGGCG | 75.0% |
| 3864 | ACAUCAAAAUCAUGGCGUC | 74.9% |
| 3865 | GACAUCAAAAUCAUGGCGU | 74.9% |
| 3866 | CCAGGAGUGGAGGAAACAC | 74.9% |
| 3867 | ACCAGGAGUGGAGGAAACA | 74.9% |
| 3868 | AGUGACAUCAAAAUCAUGG | 74.9% |
| 3869 | GACCCUUUCAAACUACUUC | 74.8% |
| 3870 | GUACUCUUGAACUGAGAAG | 74.8% |
| 3871 | ACCCUUUCAAACUACUUCA | 74.8% |
| 3872 | AGUACUCUUGAACUGAGAA | 74.7% |
| 3873 | GAGUGACAUCAAAAUCAUG | 74.6% |
| 3874 | CCCUUUCAAACUACUUCAA | 74.6% |
| 3875 | CCAAAUGUGCACUGAACUU | 74.5% |
| 3876 | AGUGCUUAUGAGAGAAUGU | 74.4% |
| 3877 | GGAUGGCAUGCCAUUCUGC | 74.3% |
| 3878 | UGGAUGGCAUGCCAUUCUG | 74.2% |
| 3879 | CUUCAAAUGAGAACAUGGA | 74.1% |
| 3880 | CAAAUUGCUUCAAAUGAGA | 74.1% |
| 3881 | GCUUCAAAUGAGAACAUGG | 74.1% |
| 3882 | AAAUUGCUUCAAAUGAGAA | 74.0% |
| 3883 | AUUGCUUCAAAUGAGAACA | 74.0% |
| 3884 | UGAGUGACAUCAAAAUCAU | 74.0% |
| 3885 | UUGCUUCAAAUGAGAACAU | 74.0% |
| 3886 | AAUUGCUUCAAAUGAGAAC | 73.9% |
| 3887 | AACAGAGGGCCUCCGCAGG | 73.9% |
| 3888 | UGCUUCAAAUGAGAACAUG | 73.9% |
| 3889 | AGGGCCUCCGCAGGCCAAA | 73.9% |
| 3890 | CAACAGAGGGCCUCCGCAG | 73.9% |
| 3891 | UAGACCCUUUCAAACUACU | 73.9% |
| 3892 | AAUCAACAGAGGGCCUCCG | 73.8% |
| 3893 | AUCAACAGAGGGCCUCCGC | 73.8% |
| 3894 | UCAACAGAGGGCCUCCGCA | 73.8% |
| 3895 | AGACCCUUUCAAACUACUU | 73.8% |
| 3896 | GGGGAGUUUUCGAGCUCUC | 73.6% |
| 3897 | AUAGACCCUUUCAAACUAC | 73.6% |
| 3898 | GAGUUUUCGAGCUCUCAGA | 73.6% |
| 3899 | ACAGAGGGCCUCCGCAGGC | 73.5% |
| 3900 | GGAGUUUUCGAGCUCUCAG | 73.5% |
| 3901 | CAGAGGGCCUCCGCAGGCC | 73.5% |
| 3902 | AGAGGGCCUCCGCAGGCCA | 73.5% |
| 3903 | AAUAGACCCUUUCAAACUA | 73.4% |
| 3904 | GGGAGUUUUCGAGCUCUCA | 73.4% |
| 3905 | UCACUGAGUGACAUCAAAA | 73.4% |
| 3906 | GAGGGCCUCCGCAGGCCAA | 73.4% |
| 3907 | UAAUCAACAGAGGGCCUCC | 73.3% |
| 3908 | CUGAGUGACAUCAAAAUCA | 73.1% |
| 3909 | ACUGAGUGACAUCAAAAUC | 73.1% |
| 3910 | CACUGAGUGACAUCAAAAU | 73.0% |
| 3911 | AUCGAAGAUCUCAUAUUUU | 72.9% |
| 3912 | UUGUUAAGCUUCAUCAGAG | 72.6% |
| 3913 | GAUGAUUGAUGGAAUUGGG | 72.6% |
| 3914 | UGUUAAGCUUCAUCAGAGG | 72.6% |
| 3915 | UUCGAAAAAGAGGGAUAUU | 72.3% |
| 3916 | UCGAAAAAGAGGGAUAUUC | 72.3% |
| 3917 | ACAAAUUGCUUCAAAUGAG | 72.3% |
| 3918 | AGGAGUGGAGGAAACACUA | 72.3% |
| 3919 | GAGUGGAGGAAACACUAAU | 72.3% |
| 3920 | GGAGUGGAGGAAACACUAA | 72.3% |
| 3921 | CAGGAGUGGAGGAAACACU | 72.2% |
| 3922 | UCAAACGGGGGAUCAACGA | 72.0% |
| 3923 | CAAACGGGGGAUCAACGAU | 71.9% |
| 3924 | CUUAAACUCAGUGAUUAUG | 71.9% |
| 3925 | AGAAUGCAACUGAGAUUAG | 71.9% |
| 3926 | CAGAAUGCAACUGAGAUUA | 71.9% |
| 3927 | UUAAACUCAGUGAUUAUGA | 71.9% |
| 3928 | AAACGGGGGAUCAACGAUC | 71.7% |
| 3929 | AACGGGGGAUCAACGAUCG | 71.7% |
| 3930 | UCAAAUGAGAACAUGGAUA | 71.6% |
| 3931 | GUUAAGCUUCAUCAGAGGG | 71.6% |
| 3932 | UUCAAAUGAGAACAUGGAU | 71.6% |
| 3933 | CUCACAUGAUGAUCUGGCA | 71.5% |
| 3934 | GAAGGUGCAAAACCAGAAG | 71.5% |
| 3935 | CUUCGGAGACAAUGCAGAA | 71.5% |
| 3936 | GGAAGGUGCAAAACCAGAA | 71.5% |
| 3937 | AAGGUGCAAAACCAGAAGA | 71.5% |
| 3938 | ACUCACAUGAUGAUCUGGC | 71.5% |
| 3939 | AGGUGCAAAACCAGAAGAA | 71.5% |
| 3940 | GUGGAUGGCAUGCCAUUCU | 71.3% |
| 3941 | AUGGCAUGCCAUUCUGCUG | 71.3% |
| 3942 | UGGCAUGCCAUUCUGCUGC | 71.3% |
| 3943 | GAUGGCAUGCCAUUCUGCU | 71.3% |
| 3944 | GAACUUAAACUCAGUGAUU | 71.2% |
| 3945 | ACUUAAACUCAGUGAUUAU | 71.2% |
| 3946 | UUCGGAGACAAUGCAGAAG | 71.2% |
| 3947 | AUCCUAAGAAAACUGGAGG | 71.2% |
| 3948 | CCAGAAUGCAACUGAGAUU | 71.2% |
| 3949 | CUCACUGAGUGACAUCAAA | 71.2% |
| 3950 | UCGGAGACAAUGCAGAAGA | 71.2% |
| 3951 | AACUUAAACUCAGUGAUUA | 71.2% |
| 3952 | GAUCCUAAGAAAACUGGAG | 71.1% |
| 3953 | CAGCUGGUCUAACUCACAU | 71.0% |
| 3954 | GAAUGCAACUGAGAUUAGG | 71.0% |
| 3955 | ACAGCUGGUCUAACUCACA | 71.0% |
| 3956 | CAUUCUGCUGCAUUUGAAG | 70.9% |
| 3957 | AUGCCAUUCUGCUGCAUUU | 70.8% |
| 3958 | GCCAUUCUGCUGCAUUUGA | 70.8% |
| 3959 | CAUGCCAUUCUGCUGCAUU | 70.8% |
| 3960 | CCAUUCUGCUGCAUUUGAA | 70.8% |
| 3961 | UGCCAUUCUGCUGCAUUUG | 70.8% |
| 3962 | GCAUGCCAUUCUGCUGCAU | 70.8% |
| 3963 | GGCAUGCCAUUCUGCUGCA | 70.8% |
| 3964 | UGGAGAGGUGAGAAUGGGC | 70.8% |
| 3965 | GGAGAGGUGAGAAUGGGCG | 70.8% |
| 3966 | CUGGAGAGGUGAGAAUGGG | 70.8% |
| 3967 | CAAAUGAGAACAUGGAUAA | 70.6% |
| 3968 | UAAGGACCAGGAGUGGAGG | 70.6% |
| 3969 | AUAAGGACCAGGAGUGGAG | 70.6% |
| 3970 | AAGGACCAGGAGUGGAGGA | 70.5% |
| 3971 | AGGACCAGGAGUGGAGGAA | 70.5% |
| 3972 | GAAAAAGAGGGAUAUUCCU | 70.5% |
| 3973 | CGGAGACAAUGCAGAAGAG | 70.5% |
| 3974 | CGAAAAAGAGGGAUAUUCC | 70.5% |
| 3975 | GCCUGUGUGUAUGGACCUG | 70.5% |
| 3976 | AAAAAGAGGGAUAUUCCUU | 70.5% |
| 3977 | CCUGUGUGUAUGGACCUGC | 70.5% |
| 3978 | GAGAAAGUCGGAACCCAGG | 70.4% |
| 3979 | AGAGAAAGUCGGAACCCAG | 70.4% |
| 3980 | AAAUGAGAACAUGGAUAAU | 70.4% |
| 3981 | CUUCGAAAAAGAGGGAUAU | 70.4% |
| 3982 | GGACCAGGAGUGGAGGAAA | 70.4% |
| 3983 | UUUUCGAGCUCUCAGACGA | 70.3% |
| 3984 | CUGCAGUCAAAGGAAUCGG | 70.3% |
| 3985 | AGUUUUCGAGCUCUCAGAC | 70.3% |
| 3986 | GAAAGUCGGAACCCAGGAA | 70.3% |
| 3987 | GUUUUCGAGCUCUCAGACG | 70.3% |
| 3988 | GCUGCAGUCAAAGGAAUCG | 70.3% |
| 3989 | AGAAAGUCGGAACCCAGGA | 70.3% |
| 3990 | AAAGUCGGAACCCAGGAAA | 70.3% |
| 3991 | AACAGCUUGACAAUAGAGA | 70.2% |
| 3992 | GGAGACAAUGCAGAAGAGU | 70.2% |
| 3993 | AGAUUGUUAAGCUUCAUCA | 70.1% |
| 3994 | GAUUGUUAAGCUUCAUCAG | 70.1% |
| 3995 | UGGAAGAACACCCCAGCGC | 70.1% |
| 3996 | CUGCCUGUGUGUAUGGACC | 70.0% |
| 3997 | CUGGAAGAACACCCCAGCG | 70.0% |
| 3998 | GAGACAAUGCAGAAGAGUA | 70.0% |
| 3999 | AAUGAGAACAUGGAUAAUA | 70.0% |
| 4000 | AUGAGAACAUGGAUAAUAU | 70.0% |
| 4001 | CCUGCCUGUGUGUAUGGAC | 70.0% |

TABLE 2-6

Conserved 19-mer sequences that are present
in at least 70% of the Influenza A segment
2 (NA) sequences listed in Table 1-6.

| Seq | | |
|---|---|---|
| ID | Sequence | Percent |
| 4002 | CAGGCUCAUGGCCUGAUGG | 87.4% |
| 4003 | GUGGACCUCAAACAGUAUU | 87.4% |
| 4004 | UAGCAUGGUCCAGCUCAAG | 87.3% |
| 4005 | UGGACCUCAAACAGUAUUG | 87.3% |
| 4006 | ACAGGCUCAUGGCCUGAUG | 87.2% |
| 4007 | GGACCUCAAACAGUAUUGU | 87.1% |
| 4008 | UGGUCCAGCUCAAGUUGUC | 87.0% |
| 4009 | GACCUCAAACAGUAUUGUU | 87.0% |
| 4010 | GGUCCAGCUCAAGUUGUCA | 87.0% |
| 4011 | CAUGGUCCAGCUCAAGUUG | 87.0% |
| 4012 | GCAUGGUCCAGCUCAAGUU | 87.0% |
| 4013 | ACCUCAAACAGUAUUGUUG | 87.0% |
| 4014 | AGCAUGGUCCAGCUCAAGU | 87.0% |
| 4015 | AUGGUCCAGCUCAAGUUGU | 86.7% |
| 4016 | CCAGUUAUGUGUGCUCAGG | 86.4% |
| 4017 | CAAACAGUAUUGUUGUGUU | 86.4% |
| 4018 | UCAAACAGUAUUGUUGUGU | 86.4% |
| 4019 | CCUCAAACAGUAUUGUUGU | 86.4% |
| 4020 | UCCAGUUAUGUGUGCUCAG | 86.4% |
| 4021 | UUCCAGUUAUGUGUGCUCA | 86.3% |
| 4022 | UCUGCAGAGACAACUGGAA | 86.1% |
| 4023 | UGCAGAGACAACUGGAAAG | 86.1% |
| 4024 | GCAGAGACAACUGGAAAGG | 86.1% |
| 4025 | CUCAAACAGUAUUGUUGUG | 86.1% |
| 4026 | CUGCAGAGACAACUGGAAA | 86.1% |
| 4027 | GUCCAGCUCAAGUUGUCAC | 86.0% |
| 4028 | GAGACAACUGGAAAGGCUC | 86.0% |
| 4029 | GCUCAAGUUGUCACGAUGG | 85.9% |
| 4030 | CCAGCUCAAGUUGUCACGA | 85.9% |
| 4031 | UCCAGCUCAAGUUGUCACG | 85.9% |
| 4032 | CAGUAGUAAUGACUGAUGG | 85.9% |
| 4033 | CAGCUCAAGUUGUCACGAU | 85.8% |
| 4034 | AGAGACAACUGGAAAGGCU | 85.8% |
| 4035 | AGCUCAAGUUGUCACGAUG | 85.8% |
| 4036 | CAGAGACAACUGGAAAGGC | 85.8% |
| 4037 | GAAUGCGUUUGUAUCAAUG | 85.7% |
| 4038 | AAUGCGUUUGUAUCAAUGG | 85.7% |
| 4039 | AGUAUUGUUGUGUUUUGUG | 85.6% |
| 4040 | GUAUUGUUGUGUUUUGUGG | 85.6% |
| 4041 | UCAAGUUGUCACGAUGGAA | 85.5% |
| 4042 | GUUGUCACGAUGGAAAAGC | 85.5% |
| 4043 | CAGUAUUGUUGUGUUUUGU | 85.5% |
| 4044 | AUUGGUCAAAGCCGCAAUG | 85.5% |
| 4045 | CAAGUUGUCACGAUGGAAA | 85.5% |
| 4046 | ACAGUAUUGUUGUGUUUUG | 85.5% |
| 4047 | AACAGUAUUGUUGUGUUUU | 85.5% |
| 4048 | AAUUGGUCAAAGCCGCAAU | 85.5% |
| 4049 | AAACAGUAUUGUUGUGUUU | 85.4% |
| 4050 | AGUUGUCACGAUGGAAAAG | 85.4% |
| 4051 | CUCAAGUUGUCACGAUGGA | 85.4% |
| 4052 | AAGUUGUCACGAUGGAAAA | 85.3% |
| 4053 | CAACUGCUAGCUUCAUUUA | 85.1% |
| 4054 | GCAACUGCUAGCUUCAUUU | 85.1% |
| 4055 | AAUGCAACUGCUAGCUUCA | 84.9% |
| 4056 | UGCAACUGCUAGCUUCAUU | 84.9% |
| 4057 | AUGCAACUGCUAGCUUCAU | 84.9% |
| 4058 | GAACCUUAUGUGUCAUGCG | 84.8% |
| 4059 | AACCUUAUGUGUCAUGCGA | 84.7% |
| 4060 | AAUCCAAAUCAAAAGAUAA | 84.7% |
| 4061 | AUCCAAAUCAAAAGAUAAU | 84.7% |
| 4062 | AAAUGCAACUGCUAGCUUC | 84.7% |
| 4063 | UCCAAAUCAAAAGAUAAUA | 84.6% |
| 4064 | CAAAUCAAAAGAUAAUAAC | 84.5% |
| 4065 | AUAGCAUGGUCCAGCUCAA | 84.5% |
| 4066 | CCAAAUCAAAAGAUAAUAA | 84.5% |
| 4067 | ACAGUAGUAAUGACUGAUG | 84.4% |
| 4068 | GUCACGAUGGAAAAGCAUG | 84.2% |
| 4069 | UUGGUCAAAGCCGCAAUGU | 84.2% |
| 4070 | GUGGAGUUGAUAAGGGGAA | 84.2% |
| 4071 | UCACGAUGGAAAAGCAUGG | 84.2% |
| 4072 | UGGAGUUGAUAAGGGGAAG | 84.1% |
| 4073 | UGUCACGAUGGAAAAGCAU | 84.1% |
| 4074 | GAGAACCUUAUGUGUCAUG | 84.0% |
| 4075 | AGAGAACCUUAUGUGUCAU | 84.0% |
| 4076 | UUGUCACGAUGGAAAAGCA | 83.9% |
| 4077 | ACCUUAUGUGUCAUGCGAU | 83.8% |
| 4078 | CCUUAUGUGUCAUGCGAUC | 83.8% |
| 4079 | AGGCUCAUGGCCUGAUGGG | 83.8% |
| 4080 | UUUUAUGUGGAGUUGAUAA | 83.8% |
| 4081 | GGCUCAUGGCCUGAUGGGG | 83.8% |
| 4082 | UUUAUGUGGAGUUGAUAAG | 83.8% |
| 4083 | GGUGCUUUUAUGUGGAGUU | 83.7% |
| 4084 | ACGUGUGGAUGGGAAGAAC | 83.6% |
| 4085 | AACAUAACAGAGAUAGUGU | 83.6% |
| 4086 | ACAUAACAGAGAUAGUGUA | 83.6% |
| 4087 | AUGACGUGUGGAUGGGAAG | 83.6% |
| 4088 | UAUUGUUGUGUUUUGUGGC | 83.5% |
| 4089 | UGACGUGUGGAUGGGAAGA | 83.5% |
| 4090 | GACGUGUGGAUGGGAAGAA | 83.5% |
| 4091 | AUUGUUGUGUUUUGUGGCA | 83.5% |
| 4092 | UUGUUGUGUUUUGUGGCAC | 83.5% |
| 4093 | UACAGAAAUUGGUCAAAGC | 83.4% |
| 4094 | AAAAUGCAACUGCUAGCUU | 83.4% |
| 4095 | ACAGAAAUUGGUCAAAGCC | 83.4% |
| 4096 | AUGUGGAGUUGAUAAGGGG | 83.3% |
| 4097 | GCUUUUAUGUGGAGUUGAU | 83.3% |
| 4098 | UAUGUGGAGUUGAUAAGGG | 83.3% |
| 4099 | UGUGGAGUUGAUAAGGGGA | 83.3% |
| 4100 | CUUUUAUGUGGAGUUGAUA | 83.3% |
| 4101 | GUGCUUUUAUGUGGAGUUG | 83.3% |
| 4102 | UGCUUUUAUGUGGAGUUGA | 83.3% |
| 4103 | UGUGGAUGGGAAGAACGAU | 83.3% |
| 4104 | AGAACCUUAUGUGUCAUGC | 83.2% |
| 4105 | UUAUGUGGAGUUGAUAAGG | 83.1% |
| 4106 | AUUACAGGAUUUGCACCUU | 83.1% |
| 4107 | AUACAGAAAUUGGUCAAAG | 83.1% |
| 4108 | UUACAGGAUUUGCACCUUU | 83.1% |
| 4109 | AAAGCAUGGCUGCAUGUUU | 83.1% |
| 4110 | AAGCAUGGCUGCAUGUUUG | 83.1% |
| 4111 | GUGUGGAUGGGAAGAACGA | 83.1% |
| 4112 | AGCAUGGCUGCAUGUUUGU | 83.1% |
| 4113 | AUGGAACAGGCUCAUGGCC | 83.0% |
| 4114 | UAUGGAACAGGCUCAUGGC | 83.0% |
| 4115 | GCUCAUGGCCUGAUGGGGC | 82.9% |
| 4116 | GAAUACAGAAAUUGGUCAA | 82.9% |
| 4117 | AAUACAGAAAUUGGUCAAA | 82.9% |
| 4118 | UGGAACAGGCUCAUGGCCU | 82.9% |
| 4119 | GAAAUUGGUCAAAGCCGCA | 82.8% |
| 4120 | GGAACAGGCUCAUGGCCUG | 82.8% |
| 4121 | AGAAAUUGGUCAAAGCCGC | 82.8% |
| 4122 | GAACAGGCUCAUGGCCUGA | 82.8% |
| 4123 | CUCAUGGCCUGAUGGGGCG | 82.7% |
| 4124 | AAAUUGGUCAAAGCCGCAA | 82.7% |
| 4125 | CAGGAUUUGCACCUUUUUC | 82.7% |
| 4126 | ACAGGAUUUGCACCUUUUU | 82.7% |
| 4127 | AACAGGCUCAUGGCCUGAU | 82.7% |
| 4128 | GGAAAAGCAUGGCUGCAUG | 82.6% |
| 4129 | GAAAAGCAUGGCUGCAUGU | 82.6% |
| 4130 | AAAAGCAUGGCUGCAUGUU | 82.6% |
| 4131 | UGGAAAAGCAUGGCUGCAU | 82.5% |
| 4132 | AUGGAAAAGCAUGGCUGCA | 82.5% |
| 4133 | GAUGGAAAAGCAUGGCUGC | 82.4% |
| 4134 | GUGGAUGGGAAGAACGAUC | 82.4% |
| 4135 | CAGAAAUUGGUCAAAGCCG | 82.3% |
| 4136 | UACAGGAUUUGCACCUUUU | 82.2% |
| 4137 | CGUGUGGAUGGGAAGAACG | 82.0% |
| 4138 | CAUAACAGAGAUAGUGUAU | 81.8% |
| 4139 | UUAUGUGUCAUGCGAUCCU | 81.8% |
| 4140 | CUUAUGUGUCAUGCGAUCC | 81.8% |
| 4141 | GGAUUUGCACCUUUUUCUA | 81.5% |
| 4142 | CACGAUGGAAAAGCAUGGC | 81.5% |
| 4143 | ACGAE3GGAAAAGCAUGGCU | 81.5% |
| 4144 | UGGAUGGGAAGAACGAUCA | 81.4% |
| 4145 | GAUUUGCACCUUUUUCUAA | 81.4% |
| 4146 | AUUUGCACCUUUUUCUAAG | 81.4% |
| 4147 | UUGCACCUUUUUCUAAGGA | 81.4% |
| 4148 | CGAUGGAAAAGCAUGGCUG | 81.4% |
| 4149 | UUUGCACCUUUUUCUAAGG | 81.4% |
| 4150 | UAUGUGUCAUGCGAUCCUG | 81.3% |
| 4151 | UGAAUCCAAAUCAAAAGAU | 81.3% |
| 4152 | AUGAAUCCAAAUCAAAAGA | 81.3% |
| 4153 | GAAUCCAAAUCAAAAGAUA | 81.3% |
| 4154 | GGAUGGGAAGAACGAUCAG | 80.5% |
| 4155 | UGAAAGGCUGGGCCUUUGA | 80.1% |
| 4156 | GAGUGAAAGGCUGGGCCUU | 80.0% |
| 4157 | GGAGUGAAAGGCUGGGCCU | 80.0% |
| 4158 | GUGAAAGGCUGGGCCUUUG | 80.0% |
| 4159 | UGCACCUUUUUCUAAGGAC | 79.8% |
| 4160 | GCACCUUUUUCUAAGGACA | 79.8% |
| 4161 | CACCUUUUUCUAAGGACAA | 79.8% |
| 4162 | CAUGGCUGCAUGUUUGUGU | 79.8% |
| 4163 | AGUGAAAGGCUGGGCCUUU | 79.8% |
| 4164 | GCAUGGCUGCAUGUUUGUG | 79.8% |
| 4165 | ACCUUUUUCUAAGGACAAU | 79.8% |
| 4166 | CCUUUUUCUAAGGACAAUU | 79.7% |
| 4167 | GAUGGGAAGAACGAUCAGC | 79.7% |
| 4168 | CUUUUUCUAAGGACAAUUC | 79.7% |
| 4169 | UAACUACUGUAACAUUGCA | 79.3% |
| 4170 | CUACUGUAACAUUGCAUUU | 79.3% |
| 4171 | ACUACUGUAACAUUGCAUU | 79.3% |
| 4172 | AACUACUGUAACAUUGCAU | 79.0% |
| 4173 | GAAAUGACGUGUGGAUGGG | 78.6% |
| 4174 | GGAAAUGACGUGUGGAUGG | 78.5% |
| 4175 | UGGAAAUGACGUGUGGAUG | 78.4% |
| 4176 | AUGGAAAUGACGUGUGGAU | 78.4% |
| 4177 | GAUGGAAAUGACGUGUGGA | 78.3% |
| 4178 | AAAUGACGUGUGGAUGGGA | 78.2% |
| 4179 | AAUGACGUGUGGAUGGGAA | 78.2% |
| 4180 | GUACAGUAGUAAUGACUGA | 78.0% |
| 4181 | UGUACAGUAGUAAUGACUG | 78.0% |
| 4182 | AGGAUUUGCACCUUUUUCU | 78.0% |
| 4183 | CUUGUACAGUAGUAAUGAC | 78.0% |
| 4184 | ACUUGUACAGUAGUAAUGA | 77.9% |
| 4185 | UACAGUAGUAAUGACUGAU | 77.9% |
| 4186 | UUGUACAGUAGUAAUGACU | 77.9% |
| 4187 | AACUGCUAGCUUCAUUUAC | 77.9% |
| 4188 | GUUAUUCUGGUAUUUUCUC | 77.6% |
| 4189 | GGUUAUUCUGGUAUUUUCU | 77.6% |
| 4190 | AUACUAAAAUACUAUUCAU | 77.2% |
| 4191 | GAUACUAAAAUACUAUUCA | 77.1% |
| 4192 | UACUAAAAUACUAUUCAUU | 77.1% |
| 4193 | AUGAAACCUUCAAAGUCAU | 77.0% |
| 4194 | UCAGAUGUGUCUGCAGAGA | 76.9% |
| 4195 | CUGAUACUAAAAUACUAUU | 76.9% |
| 4196 | UCAAUCUCAUGCCUAUAUA | 76.9% |
| 4197 | CAGGAAGUGCUCAGCAUGU | 76.9% |
| 4198 | AUCAAUCUCAUGCCUAUAU | 76.9% |
| 4199 | CAAUCUCAUGCCUAUAUAA | 76.9% |
| 4200 | UAUGAAACCUUCAAAGUCA | 76.9% |
| 4201 | CAGAUGUGUCUGCAGAGAC | 76.8% |
| 4202 | GCUGAUACUAAAAUACUAU | 76.8% |
| 4203 | ACUAAAAUACUAUUCAUUG | 76.7% |
| 4204 | UGAUACUAAAAUACUAUUC | 76.7% |
| 4205 | AGAUGUGUCUGCAGAGACA | 76.7% |
| 4206 | CUAAAAUACUAUUCAUUGA | 76.7% |
| 4207 | GAUGUGUCUGCAGAGACAA | 76.7% |
| 4208 | UCAGGAAGUGCUCAGCAUG | 76.6% |
| 4209 | ACUGUAACAUUGCAUUUCA | 76.3% |
| 4210 | UAACAUUGCAUUUCAAGCA | 76.3% |
| 4211 | AGCUGAUACUAAAAUACUA | 76.3% |
| 4212 | GUAACAUUGCAUUUCAAGC | 76.2% |
| 4213 | GGAAAGGCUCCAAUAGGCC | 76.2% |
| 4214 | UGGAAAGGCUCCAAUAGGC | 76.2% |
| 4215 | ACACACCCAGAAAAAACGA | 76.1% |
| 4216 | UGUAACAUUGCAUUUCAAG | 76.1% |
| 4217 | CUGUAACAUUGCAUUUCAA | 76.1% |
| 4218 | GACACACCCAGAAAAAACG | 76.1% |
| 4219 | UGUCAGGAAGUGCUCAGCA | 76.0% |
| 4220 | ACACCCAGAAAAAACGACA | 76.0% |
| 4221 | UGUCUGCAGAGACAACUGG | 75.9% |
| 4222 | UGUGUCUGCAGAGACAACU | 75.9% |
| 4223 | CACCCAGAAAAAACGACAG | 75.9% |
| 4224 | CAUGGCCUGAUGGGGCGGA | 75.9% |
| 4225 | GUCUGCAGAGACAACUGGA | 75.9% |
| 4226 | GUGUCUGCAGAGACAACUG | 75.9% |
| 4227 | UCAUGGCCUGAUGGGGCGG | 75.9% |
| 4228 | GAAAGGCUCCAAUAGGCCC | 75.9% |
| 4229 | CACACCCAGAAAAAACGAC | 75.9% |
| 4230 | AUGUGUCUGCAGAGACAAC | 75.8% |
| 4231 | UUUCCAGUUAUGUGUGCUC | 75.8% |
| 4232 | GUCAGGAAGUGCUCAGCAU | 75.8% |
| 4233 | GGUGUCAGAUGUGUCUGCA | 75.6% |
| 4234 | CUGGUGUCAGAUGUGUCUG | 75.6% |
| 4235 | GUGUCAGAUGUGUCUGCAG | 75.6% |
| 4236 | UGGUGUCAGAUGUGUCUGC | 75.5% |
| 4237 | GUUUCCAGUUAUGUGUGCU | 75.5% |
| 4238 | GCAUUGUUUCCAGUUAUGU | 75.5% |
| 4239 | AGCAUUGUUUCCAGUUAUG | 75.5% |
| 4240 | GUACAUAUGGAACAGGCUC | 75.5% |
| 4241 | UGUUUCCAGUUAUGUGUGC | 75.4% |
| 4242 | GUCAGAUGUGUCUGCAGAG | 75.4% |
| 4243 | GGUACAUAUGGAACAGGCU | 75.4% |
| 4244 | UGUCAGAUGUGUCUGCAGA | 75.4% |
| 4245 | CCUGGUGUCAGAUGUGUCU | 75.4% |
| 4246 | CAUAUGGAACAGGCUCAUG | 75.3% |
| 4247 | UACAUAUGGAACAGGCUCA | 75.3% |
| 4248 | CAGGUACAUAUGGAACAGG | 75.3% |
| 4249 | ACUGGAAAGGCUCCAAUAG | 75.3% |
| 4250 | AUAUGGAACAGGCUCAUGG | 75.3% |
| 4251 | AGGUACAUAUGGAACAGGC | 75.3% |
| 4252 | AUAGCAUUGUUUCCAGUUA | 75.3% |
| 4253 | UUGUUUCCAGUUAUGUGUG | 75.3% |
| 4254 | UAGCAUUGUUUCCAGUUAU | 75.3% |
| 4255 | UCAGGUACAUAUGGAACAG | 75.2% |
| 4256 | AACUGGAAAGGCUCCAAUA | 75.2% |
| 4257 | AUUGUUUCCAGUUAUGUGU | 75.2% |
| 4258 | ACAUAUGGAACAGGCUCAU | 75.2% |
| 4259 | CAUUGUUUCCAGUUAUGUG | 75.1% |
| 4260 | CUGGAAAGGCUCCAAUAGG | 75.1% |
| 4261 | GACAACUGGAAAGGCUCCA | 75.1% |
| 4262 | UAGAAAGAAACAUAACAGA | 75.1% |
| 4263 | ACAACUGGAAAGGCUCCAA | 75.1% |
| 4264 | CAACUGGAAAGGCUCCAAU | 75.1% |
| 4265 | AGAAAGAAACAUAACAGAG | 74.9% |
| 4266 | AAAGAAACAUAACAGAGAU | 74.9% |
| 4267 | GAAAGAAACAUAACAGAGA | 74.9% |
| 4268 | AGACAACUGGAAAGGCUCC | 74.9% |
| 4269 | AAAGGCUCCAAUAGGCCCA | 74.6% |
| 4270 | GAAACAUAACAGAGAUAGU | 74.6% |
| 4271 | AGAAACAUAACAGAGAUAG | 74.6% |
| 4272 | AAGGCUCCAAUAGGCCCAU | 74.6% |
| 4273 | AAGAAACAUAACAGAGAUA | 74.6% |
| 4274 | ACCUCAGGUACAUAUGGAA | 74.4% |
| 4275 | CCUCAGGUACAUAUGGAAC | 74.3% |
| 4276 | CUCAGGUACAUAUGGAACA | 74.3% |
| 4277 | UACUGUAACAUUGCAUUUC | 74.1% |
| 4278 | UACAUGAUAGGACCCCUUA | 73.8% |
| 4279 | CAUAGCAUGGUCCAGCUCA | 73.5% |
| 4280 | AUGGGAAGAACGAUCAGCG | 73.5% |
| 4281 | UGCAUAGCAUGGUCCAGCU | 73.5% |
| 4282 | GCAUAGCAUGGUCCAGCUC | 73.5% |
| 4283 | UUGUCAGGAAGUGCUCAGC | 73.3% |
| 4284 | UGGGAAGAACGAUCAGCGA | 73.3% |
| 4285 | AUUGUCAGGAAGUGCUCAG | 73.3% |
| 4286 | CUUGUUGGAGACACACCCA | 72.9% |
| 4287 | GUGCAUAGCAUGGUCCAGC | 72.9% |
| 4288 | GUGUGCAUAGCAUGGUCCA | 72.9% |
| 4289 | UUGUUGGAGACACACCCAG | 72.9% |
| 4290 | UGUGCAUAGCAUGGUCCAG | 72.9% |
| 4291 | UGUUGGAGACACACCCAGA | 72.9% |
| 4292 | GUUGGAGACACACCCAGAA | 72.9% |
| 4293 | AAGUGUGCAUAGCAUGGUC | 72.8% |
| 4294 | AGUGUGCAUAGCAUGGUCC | 72.8% |
| 4295 | UUGGAGACACACCCAGAAA | 72.8% |
| 4296 | CAAGUGUGCAUAGCAUGGU | 72.7% |
| 4297 | GGAGACACACCCAGAAAAA | 72.6% |
| 4298 | UGGAGACACACCCAGAAAA | 72.6% |
| 4299 | AAACAUAACAGAGAUAGUG | 72.4% |
| 4300 | AGAAUACAGAAAUUGGUCA | 72.4% |
| 4301 | UCCGGUUAUUCUGGUAUUU | 72.4% |
| 4302 | AUUAUAGCAUUGUUUCCAG | 72.4% |
| 4303 | UAUAGCAUUGUUUCCAGUU | 72.4% |
| 4304 | GGGAAGAACGAUCAGCGAG | 72.4% |
| 4305 | CCGGUUAUUCUGGUAUUUU | 72.4% |
| 4306 | UUAUAGCAUUGUUUCCAGU | 72.4% |
| 4307 | CAGUACAUGAUAGGACCCC | 72.3% |
| 4308 | UGCGUUUGUAUCAAUGGAA | 72.3% |
| 4309 | GAUUAUAGCAUUGUUUCCA | 72.3% |
| 4310 | GGCUGCAUGUUUGUGUAAC | 72.2% |
| 4311 | CACCUCAGGUACAUAUGGA | 72.2% |
| 4312 | GUACAUGAUAGGACCCCUU | 72.2% |
| 4313 | UGGCACCUCAGGUACAUAU | 72.2% |
| 4314 | CGGUUAUUCUGGUAUUUUC | 72.2% |
| 4315 | GAGACACACCCAGAAAAAA | 72.2% |
| 4316 | GGCACCUCAGGUACAUAUG | 72.2% |
| 4317 | GUGGCACCUCAGGUACAUA | 72.2% |
| 4318 | GCGUUUGUAUCAAUGGAAC | 72.2% |
| 4319 | UUUGUAUCAAUGGAACUUG | 72.2% |
| 4320 | ACAGUACAUGAUAGGACCC | 72.2% |
| 4321 | GCACCUCAGGUACAUAUGG | 72.2% |
| 4322 | UGUGGCACCUCAGGUACAU | 72.2% |
| 4323 | UGGCUGCAUGUUUGUGUAA | 72.2% |
| 4324 | AGUACAUGAUAGGACCCCU | 72.2% |
| 4325 | GUUUGUAUCAAUGGAACUU | 72.1% |
| 4326 | AUGCGUUUGUAUCAAUGGA | 72.1% |
| 4327 | ACACAGUACAUGAUAGGAC | 72.0% |
| 4328 | UUGUAUCAAUGGAACUUGU | 72.0% |
| 4329 | CGUUUGUAUCAAUGGAACU | 72.0% |
| 4330 | GUCCGGUUAUUCUGGUAUU | 72.0% |
| 4331 | UCAAUCGGUGCUUUUAUGU | 72.0% |
| 4332 | CACAGUACAUGAUAGGACC | 72.0% |
| 4333 | AGACACACCCAGAAAAAAC | 71.9% |
| 4334 | AUGUGUGCUCAGGACUUGU | 71.9% |
| 4335 | GUUAUGUGUGCUCAGGACU | 71.9% |
| 4336 | CGAUAUCCUGGUGUCAGAU | 71.9% |
| 4337 | UUAUGUGUGCUCAGGACUU | 71.9% |
| 4338 | AUAUCCUGGUGUCAGAUGU | 71.9% |
| 4339 | UAUGUGUGCUCAGGACUUG | 71.9% |
| 4340 | UGUGCUCAGGACUUGUUGG | 71.9% |
| 4341 | GAUAUCCUGGUGUCAGAUG | 71.9% |
| 4342 | AAUCGGUGCUUUUAUGUGG | 71.8% |
| 4343 | UGUGUGCUCAGGACUUGUU | 71.8% |
| 4344 | CUCGAUAUCCUGGUGUCAG | 7 1.8% |
| 4345 | AGUUAUGUGUGCUCAGGAC | 71.8% |
| 4346 | GUGUGCUCAGGACUUGUUG | 71.8% |
| 4347 | AUCGGUGCUUUUAUGUGGA | 71.8% |
| 4348 | GCAAGUGUGCAUAGCAUGG | 71.8% |
| 4349 | UUUUGUGGCACCUCAGGUA | 71.7% |
| 4350 | CCUCGAUAUCCUGGUGUCA | 71.7% |
| 4351 | AUCAAUCGGUGCUUUUAUG | 7 1.7% |
| 4352 | UCGAUAUCCUGGUGUCAGA | 7 1.7% |
| 4353 | GUUUUGUGGCACCUCAGGU | 71.7% |
| 4354 | UUUGUGGCACCUCAGGUAC | 71.7% |
| 4355 | CAAUCGGUGCUUUUAUGUG | 71.7% |
| 4356 | UUGUGGCACCUCAGGUACA | 71.6% |
| 4357 | CAGUUAUGUGUGCUCAGGA | 71.5% |
| 4358 | ACCCAGAAAAAACGACAGC | 71.5% |
| 4359 | CCCAGAAAAAACGACAGCU | 71.5% |
| 4360 | GCAUCAAUCGGUGCUUUUA | 71.4% |
| 4361 | UUGUGUUUUGUGGCACCUC | 71.4% |
| 4362 | CAUCAAUCGGUGCUUUUAU | 71.4% |
| 4363 | UCCUCGAUAUCCUGGUGUC | 71.4% |
| 4364 | UGCAUCAAUCGGUGCUUUU | 71.4% |
| 4365 | AUCCUCGAUAUCCUGGUGU | 71.4% |
| 4366 | UAUCCUCGAUAUCCUGGUG | 71.4% |
| 4367 | GCUCAGGACUUGUUGGAGA | 71.3% |
| 4368 | UGCUCAGGACUUGUUGGAG | 71.3% |
| 4369 | GUUGUGUUUUGUGGCACCU | 71.3% |
| 4370 | UGUUGUGUUUUGUGGCACC | 71.3% |
| 4371 | AUUGGCUCUGUUUCUCUCA | 71.2% |
| 4372 | UGUGUUUUGUGGCACCUCA | 71.2% |
| 4373 | GGACUUGUUGGAGACACAC | 71.2% |
| 4374 | GACUUGUUGGAGACACACC | 71.2% |
| 4375 | CAGGACUUGUUGGAGACAC | 71.2% |
| 4376 | CUCAGGACUUGUUGGAGAC | 71.2% |
| 4377 | AGGACUUGUUGGAGACACA | 71.2% |
| 4378 | GUGUUUUGUGGCACCUCAG | 71.2% |
| 4379 | UCAGGACUUGUUGGAGACA | 71.2% |
| 4380 | UGUUUUGUGGCACCUCAGG | 71.2% |
| 4381 | ACUUGUUGGAGACACACCC | 71.1% |
| 4382 | UCAAUGGAACUUGUACAGU | 71.0% |
| 4383 | AUCAAUGGAACUUGUACAG | 7 1.0% |
| 4384 | CUGCAUCAAUCGGUGCUUU | 71.0% |
| 4385 | GUGCUCAGGACUUGUUGGA | 70.9% |
| 4386 | GUUAUCAAUUUGCCCUUGG | 70.8% |
| 4387 | AAGCUGCAUCAAUCGGUGC | 70.8% |
| 4388 | GCUGCAUCAAUCGGUGCUU | 70.8% |
| 4389 | UGUUAUCAAUUUGCCCUUG | 70.8% |
| 4390 | AAAAGCUGCAUCAAUCGGU | 70.8% |
| 4391 | AAAGCUGCAUCAAUCGGUG | 70.8% |
| 4392 | AGCUGCAUCAAUCGGUGCU | 70.8% |
| 4393 | UUGGCUCUGUUUCUCUCAC | 70.7% |
| 4394 | GGUCCGGUUAUUCUGGUAU | 70.7% |
| 4395 | AGGUCCGGUUAUUCUGGUA | 70.7% |
| 4396 | CAAAAGCUGCAUCAAUCGG | 70.6% |
| 4397 | AUGGCUGCAUGUUUGUGUA | 70.6% |
| 4398 | UAUCAAUGGAACUUGUACA | 70.6% |
| 4399 | GUAUCAAUGGAACUUGUAC | 70.6% |
| 4400 | UGUAUCAAUGGAACUUGUA | 70.6% |
| 4401 | AAUAGAAAGAAACAUAACA | 70.6% |
| 4402 | UCAUGGAGUGAAAGGCUGG | 70.5% |
| 4403 | CAUGGAGUGAAAGGCUGGG | 70.5% |
| 4404 | CAAGAGAACCUUAUGUGUC | 70.5% |
| 4405 | AUGGAGUGAAAGGCUGGGC | 70.5% |
| 4406 | AUAGAAAGAAACAUAACAG | 70.5% |
| 4407 | ACAAGAGAACCUUAUGUGU | 70.5% |
| 4408 | UGGAGUGAAAGGCUGGGCC | 70.4% |
| 4409 | UCAAAUGACACAGUACAUG | 70.4% |
| 4410 | GCAAAAGCUGCAUCAAUCG | 70.4% |
| 4411 | AAGAGAACCUUAUGUGUCA | 70.4% |
| 4412 | AUGACACAGUACAUGAUAG | 70.3% |
| 4413 | AAUGACACAGUACAUGAUA | 70.3% |
| 4414 | UUUGAUGAUGGAAAUGACG | 70.3% |
| 4415 | UAAUAGAAAGAAACAUAAC | 70.3% |
| 4416 | AGGGAACAACACUAAACAA | 70.3% |
| 4417 | UAUCCUGGUGUCAGAUGUG | 70.2% |
| 4418 | AUCCUGGUGUCAGAUGUGU | 70.2% |
| 4419 | UCGGUGCUUUUAUGUGGAG | 70.2% |
| 4420 | CAGGGAACAACACUAAACA | 70.2% |
| 4421 | GACACAGUACAUGAUAGGA | 70.2% |
| 4422 | UUGAUGAUGGAAAUGACGU | 70.2% |
| 4423 | GGGAACAACACUAAACAAC | 70.1% |
| 4424 | GGCAAAAGCUGCAUCAAUC | 70.1% |
| 4425 | CAAAUGACACAGUACAUGA | 70.0% |
| 4426 | UCCUGGUGUCAGAUGUGUC | 70.0% |

TABLE 2-7

Conserved 19-mer sequences that are present
in at least 70% of the Influenza A segment
2 (M1 & M2) sequences listed in Table 1-7.

| Seq | | |
|---|---|---|
| ID | Sequence | Percent |
| 4427 | UUCACGCUCACCGUGCCCA | 99.2% |
| 4428 | CAGGCCCCCUCAAAGCCGA | 99.0% |
| 4429 | UCAGGCCCCCUCAAAGCCG | 99.0% |
| 4430 | UCACGCUCACCGUGCCCAG | 98.9% |
| 4431 | CACGCUCACCGUGCCCAGU | 98.8% |
| 4432 | CGCUCACCGUGCCCAGUGA | 98.8% |
| 4433 | ACGCUCACCGUGCCCAGUG | 98.8% |
| 4434 | UCACCGUGCCCAGUGAGCG | 98.7% |
| 4435 | CUCACCGUGCCCAGUGAGC | 98.7% |
| 4436 | GCUCACCGUGCCCAGUGAG | 98.5% |
| 4437 | AUCUUGAGGCUCUCAUGGA | 96.4% |
| 4438 | GAUCUUGAGGCUCUCAUGG | 96.4% |
| 4439 | UGUCACCUCUGACUAAGGG | 96.3% |
| 4440 | CUGUCACCUCUGACUAAGG | 96.3% |
| 4441 | GACUGCAGCGUAGACGCUU | 95.6% |
| 4442 | GGACUGCAGCGUAGACGCU | 95.6% |
| 4443 | UGCAGCGUAGACGCUUUGU | 95.5% |
| 4444 | ACUGCAGCGUAGACGCUUU | 95.5% |
| 4445 | CUGCAGCGUAGACGCUUUG | 95.5% |
| 4446 | GCUAUGGAGCAAAUGGCUG | 95.4% |
| 4447 | UGGCUAAAGACAAGACCAA | 95.4% |
| 4448 | CAGCGUAGACGCUUUGUCC | 95.4% |
| 4449 | CUAUGGAGCAAAUGGCUGG | 95.4% |
| 4450 | AGCGUAGACGCUUUGUCCA | 95.4% |
| 4451 | GCAGCGUAGACGCUUUGUC | 95.4% |
| 4452 | GGCUAAAGACAAGACCAAU | 95.4% |
| 4453 | CGUAGACGCUUUGUCCAAA | 94.9% |
| 4454 | GUAGACGCUUUGUCCAAAA | 94.9% |
| 4455 | AGACGCUUUGUCCAAAAUG | 94.8% |
| 4456 | UAGACGCUUUGUCCAAAAU | 94.8% |
| 4457 | GACGCUUUGUCCAAAAUGC | 94.7% |
| 4458 | ACGCUUUGUCCAAAAUGCC | 94.3% |
| 4459 | GCUUUGUCCAAAAUGCCCU | 94.3% |
| 4460 | CGCUUUGUCCAAAAUGCCC | 94.3% |
| 4461 | UCAGUUAUUCUGCUGGUGC | 94.2% |
| 4462 | AUUCUGCUGGUGCACUUGC | 94.1% |
| 4463 | CUCAUGGAAUGGCUAAAGA | 94.1% |
| 4464 | UCAUGGAAUGGCUAAAGAC | 94.1% |
| 4465 | UAUUCUGCUGGUGCACUUG | 94.1% |
| 4466 | AUGGAAUGGCUAAAGACAA | 94.0% |
| 4467 | CUCAGUUAUUCUGCUGGUG | 94.0% |
| 4468 | GUUAUUCUGCUGGUGCACU | 94.0% |
| 4469 | UGGCCAGCACUACAGCUAA | 94.0% |
| 4470 | UUAUUCUGCUGGUGCACUU | 94.0% |
| 4471 | CAUGGAAUGGCUAAAGACA | 94.0% |
| 4472 | UGGAAUGGCUAAAGACAAG | 93.9% |
| 4473 | UCUCAUGGAAUGGCUAAAG | 93.9% |
| 4474 | AGUUAUUCUGCUGGUGCAC | 93.9% |
| 4475 | GGAAUGGCUAAAGACAAGA | 93.7% |
| 4476 | AAUGGCUAAAGACAAGACC | 93.7% |
| 4477 | GAAUGGCUAAAGACAAGAC | 93.7% |
| 4478 | UCCAUGGGGCCAAAGAAAU | 93.4% |
| 4479 | GCGUAGACGCUUUGUCCAA | 93.4% |
| 4480 | CAGUUAUUCUGCUGGUGCA | 93.4% |
| 4481 | UUCCAUGGGGCCAAAGAAA | 93.4% |
| 4482 | CACCUCUGACUAAGGGGAU | 93.2% |
| 4483 | GUCACCUCUGACUAAGGGG | 93.2% |
| 4484 | UCACCUCUGACUAAGGGGA | 93.2% |
| 4485 | CUGGUGCACUUCCCAGUUG | 93.0% |
| 4486 | GAGGCUCUCAUGGAAUGGC | 93.0% |
| 4487 | GCUCUCAUGGAAUGGCUAA | 93.0% |
| 4488 | CUCUCAUGGAAUGGCUAAA | 93.0% |
| 4489 | AUGGGGCCAAAGAAAUAGC | 93.0% |
| 4490 | AGGCUCUCAUGGAAUGGCU | 93.0% |
| 4491 | GGCUCUCAUGGAAUGGCUA | 92.9% |
| 4492 | UUGAGGCUCUCAUGGAAUG | 92.9% |
| 4493 | UGAGGCUCUCAUGGAAUGG | 92.9% |
| 4494 | CUUGAGGCUCUCAUGGAAU | 92.9% |
| 4495 | CAUGGGGCCAAAGAAAUAG | 92.9% |
| 4496 | GCUGGUGCACUUGCCAGUU | 92.9% |
| 4497 | CUUCUACGGAAGGAGUACC | 92.8% |
| 4498 | UCUUGAGGCUCUCAUGGAA | 92.7% |
| 4499 | CUGCUGGUGCACUUGCCAG | 92.7% |
| 4500 | UGCUGGUGCACUUGCCAGU | 92.7% |
| 4501 | UCUGCUGGUGCACUUGCCA | 92.7% |
| 4502 | CCAUGGGGCCAAAGAAAUA | 92.6% |
| 4503 | AGUCUAUGAGGGAAGAAUA | 92.6% |
| 4504 | CCUUCUACGGAAGGAGUAC | 92.5% |
| 4505 | GUCUAUGAGGGAAGAAUAU | 92.4% |
| 4506 | CUAUGAGGGAAGAAUAUCG | 92.4% |
| 4507 | UCUAUGAGGGAAGAAUAUC | 92.4% |
| 4508 | GUCAUUUUGUCAGCAUAGA | 92.2% |
| 4509 | GAGUCUAUGAGGGAAGAAU | 92.2% |
| 4510 | UCAUUUUGUCAGCAUAGAG | 92.1% |
| 4511 | AGACUUGAAGAUGUCUUUG | 91.9% |
| 4512 | GACUUGAAGAUGUCUUUGC | 91.9% |
| 4513 | AGAGACUUGAAGAUGUCUU | 91.9% |
| 4514 | GAGACUUGAAGAUGUCUUU | 91.9% |
| 4515 | CAGAGACUUGAAGAUGUCU | 91.9% |
| 4516 | GUGCAGAUGCAACGAUUCA | 91.7% |
| 4517 | UUCUGCUGGUGCACUUGCC | 91.7% |
| 4518 | UGCAGAUGCAACGAUUCAA | 91.6% |
| 4519 | UAUGAGGGAAGAAUAUCGA | 91.5% |
| 4520 | AUGGGGGUGCAGAUGCAAC | 91.3% |
| 4521 | UGGGGGUGCAGAUGCAACG | 91.3% |
| 4522 | ACCUCUGACUAAGGGGAUU | 91.3% |
| 4523 | UGGAUUCUUGAUCGUCUUU | 91.1% |
| 4524 | GGAUUCUUGAUCGUCUUUU | 91.1% |
| 4525 | GGGGUGCAGAUGCAACGAU | 90.8% |
| 4526 | GGGUGCAGAUGCAACGAUU | 90.8% |
| 4527 | GUGGAUUCUUGAUCGUCUU | 90.8% |
| 4528 | GGUGCAGAUGCAACGAUUC | 90.8% |
| 4529 | GGGGGUGCAGAUGCAACGA | 90.8% |
| 4530 | CUCUGACUAAGGGGAUUUU | 90.7% |
| 4531 | CCUCUGACUAAGGGGAUUU | 90.7% |
| 4532 | UGUGGAUUCUUGAUCGUCU | 90.7% |
| 4533 | UCUUCUUGAAAAUUUGCAG | 90.5% |
| 4534 | AUGGCUAAAGACAAGACCA | 90.5% |
| 4535 | AUCUUCUUGAAAAUUUGCA | 90.5% |
| 4536 | GAAUGGGGGUGCAGAUGCA | 90.4% |
| 4537 | CGAAUGGGGGUGCAGAUGC | 90.2% |
| 4538 | AAUGGGGGUGCAGAUGCAA | 90.2% |
| 4539 | UUGAAGAUGUCUUUGCUGG | 89.9% |
| 4540 | CUUGAAGAUGUCUUUGCUG | 89.9% |
| 4541 | ACUUGAAGAUGUCUUUGCU | 89.7% |
| 4542 | GAUCCAAAUAACAUGGACA | 89.2% |
| 4543 | AUGAUCUUCUUGAAAAUUU | 89.0% |
| 4544 | AGAUUGCUGACUCCCAGCA | 88.8% |
| 4545 | CAGAUUGCUGACUCCCAGC | 88.8% |
| 4546 | GAUCUUCUUGAAAAUUUGC | 88.6% |
| 4547 | UGAUCUUCUUGAAAAUUUG | 88.6% |
| 4548 | CAGAAACGAAUGGGGGUGC | 88.5% |
| 4549 | ACGAAUGGGGGUGCAGAUG | 88.5% |
| 4550 | AGAAACGAAUGGGGGUGCA | 88.5% |
| 4551 | AAACGAAUGGGGGUGCAGA | 88.4% |
| 4552 | AACGAAUGGGGGUGCAGAU | 88.4% |
| 4553 | UGGAGCAAAUGGCUGGAUC | 88.4% |
| 4554 | AUGGAGCAAAUGGCUGGAU | 88.4% |
| 4555 | GAAACGAAUGGGGGUGCAG | 88.2% |
| 4556 | AUCGUCUUUUUUUCAAAUG | 88.1% |
| 4557 | CCUAUCAGAAACGAAUGGG | 88.1% |
| 4558 | UAUGGAGCAAAUGGCUGGA | 88.1% |
| 4559 | GAUCGUCUUUUUUUCAAAU | 88.0% |
| 4560 | UGAUCGUCUUUUUUUCAAA | 88.0% |
| 4561 | UUGAUCGUCUUUUUUUCAA | 88.0% |
| 4562 | UCGUCUUUUUUUCAAAUGC | 87.8% |
| 4563 | GAUUCUUGAUCGUCUUUUU | 87.5% |
| 4564 | AUUCUUGAUCGUCUUUUUU | 87.4% |
| 4565 | CUUGAUCGUCUUUUUUUCA | 87.2% |
| 4566 | UUGGGACUCAUCCUAGCUC | 87.2% |
| 4567 | AUUGGGAUCUUGCACUUGA | 87.1% |
| 4568 | UCUUGAUCGUCUUUUUUUC | 87.1% |
| 4569 | UUCUUGAUCGUCUUUUUUU | 87.1% |
| 4570 | GAUGAUCUUCUUGAAAAUU | 87.0% |
| 4571 | UAUCGAAAGGAACAGCAGA | 87.0% |
| 4572 | AGAUGAUCUUCUUGAAAAU | 86.9% |
| 4573 | UUGGGAUCUUGCACUUGAU | 86.9% |
| 4574 | UGGGAUCUUGCACUUGAUA | 86.9% |
| 4575 | UCAUUGGGAUCUUGCACUU | 86.6% |
| 4576 | CAUUGGGAUCUUGCACUUG | 86.5% |
| 4577 | CAGAUCUUGAGGCUCUCAU | 86.4% |
| 4578 | CACAGAUCUUGAGGCUCUC | 86.4% |
| 4579 | CCUGAGUCUAUGAGGGAAG | 86.4% |
| 4580 | ACAGAUCUUGAGGCUCUCA | 86.4% |
| 4581 | AUCAUUGGGAUCUUGCACU | 86.4% |
| 4582 | CUGAGUCUAUGAGGGAAGA | 86.4% |
| 4583 | AGAUCUUGAGGCUCUCAUG | 86.4% |
| 4584 | ACACAGAUCUUGAGGCUCU | 86.4% |
| 4585 | ACAGCUAAGGCUAUGGAGC | 86.3% |
| 4586 | CAGCUAAGGCUAUGGAGCA | 86.3% |
| 4587 | AACACAGAUCUUGAGGCUC | 86.3% |
| 4588 | GGCUAUGGAGCAAAUGGCU | 86.2% |
| 4589 | ACUACAGCUAAGGCUAUGG | 86.2% |
| 4590 | AAGGCUAUGGAGCAAAUGG | 86.2% |
| 4591 | AGGCUAUGGAGCAAAUGGC | 86.2% |
| 4592 | CUACAGCUAAGGCUAUGGA | 86.2% |
| 4593 | CCAGCACUACAGCUAAGGC | 86.1% |
| 4594 | AGCACUACAGCUAAGGCUA | 86.1% |
| 4595 | CACUACAGCUAAGGCUAUG | 86.1% |
| 4596 | GCCAGCACUACAGCUAAGG | 86.1% |
| 4597 | GCACUACAGCUAAGGCUAU | 86.1% |
| 4598 | CUAAGGCUAUGGAGCAAAU | 86.0% |
| 4599 | AAUAUCGAAAGGAACAGCA | 86.0% |
| 4600 | UAAGGCUAUGGAGCAAAUG | 86.0% |
| 4601 | GCUAAGGCUAUGGAGCAAA | 86.0% |
| 4602 | GUGAACAGAUUGCUGACUC | 86.0% |
| 4603 | UACAGCUAAGGCUAUGGAG | 86.0% |
| 4604 | UGUGAACAGAUUGCUGACU | 86.0% |
| 4605 | CAGCACUACAGCUAAGGCU | 86.0% |
| 4606 | GAAUAUCGAAAGGAACAGC | 86.0% |
| 4607 | ACAGAUUGCUGACUCCCAG | 85.9% |
| 4608 | UGAACAGAUUGCUGACUCC | 85.9% |
| 4609 | GAACAGAUUGCUGACUCCC | 85.9% |
| 4610 | AACAGAUUGCUGACUCCCA | 85.9% |
| 4611 | UAUCAUUGGGAUCUUGCAC | 85.8% |
| 4612 | ACAUGAGAACAGAAUGGUU | 85.8% |
| 4613 | UACCUGAGUCUAUGAGGGA | 85.6% |
| 4614 | AUAUCGAAAGGAACAGCAG | 85.5% |
| 4615 | AUGAGGGAAGAAUAUCGAA | 85.4% |
| 4616 | UUGCUAGUCAGGCCAGGCA | 85.4% |
| 4617 | UGAGGGAAGAAUAUCGAAA | 85.3% |
| 4618 | GGGAAGAAUAUCGAAAGGA | 85.3% |
| 4619 | GGAAGAAUAUCGAAAGGAA | 85.2% |
| 4620 | AGGGAAGAAUAUCGAAAGG | 85.2% |
| 4621 | AAGAAUAUCGAAAGGAACA | 85.2% |
| 4622 | GUACCUGAGUCUAUGAGGG | 85.2% |
| 4623 | GAAGAAUAUCGAAAGGAAC | 85.2% |
| 4624 | UGUUCACGCUCACCGUGCC | 85.2% |
| 4625 | AGAAUAUCGAAAGGAACAG | 85.2% |
| 4626 | GUGUUCACGCUCACCGUGC | 85.2% |
| 4627 | GAGGGAAGAAUAUCGAAAG | 85.1% |
| 4628 | GUUCACGCUCACCGUGCCC | 85.1% |
| 4629 | GGCCAGCACUACAGCUAAG | 85.0% |
| 4630 | UGUGUUCACGCUCACCGUG | 84.9% |
| 4631 | UUGUGUUCACGCUCACCGU | 84.9% |
| 4632 | UUUGUGUUCACGCUCACCG | 84.9% |
| 4633 | UUGUCCAAAAUGCCCUCAA | 84.8% |
| 4634 | ACCUGAGUCUAUGAGGGAA | 84.8% |
| 4635 | UUUGUCCAAAAUGCCCUCA | 84.8% |
| 4636 | AAUGCCCUCAAUGGGAAUG | 84.6% |
| 4637 | AGCUAAGGCUAUGGAGCAA | 84.6% |
| 4638 | AUGCCCUCAAUGGGAAUGG | 84.6% |
| 4639 | AGUUGCAUGGGCCUCAUAU | 84.5% |
| 4640 | GCAUGGGCCUCAUAUACAA | 84.5% |
| 4641 | UGCAUGGGCCUCAUAUACA | 84.5% |
| 4642 | GUUGCAUGGGCCUCAUAUA | 84.5% |
| 4643 | CUUUGUCCAAAAUGCCCUC | 84.5% |
| 4644 | UUGCAUGGGCCUCAUAUAC | 84.4% |
| 4645 | UCCAAAAUGCCCUCAAUGG | 84.4% |
| 4646 | GUCCAAAAUGCCCUCAAUG | 84.4% |
| 4647 | UGUCCAAAAUGCCCUCAAU | 84.3% |
| 4648 | AGUCAUUUUGUCAGCAUAG | 84.2% |
| 4649 | AAAUGCCCUCAAUGGGAAU | 84.2% |
| 4650 | AAAAUGCCCUCAAUGGGAA | 84.2% |
| 4651 | UUGGCCUGGUAUGUGCAAC | 84.2% |
| 4652 | CAAAAUGCCCUCAAUGGGA | 84.2% |
| 4653 | AUCAGAAACGAAUGGGGGU | 84.1% |
| 4654 | UCAGAAACGAAUGGGGGUG | 84.1% |
| 4655 | CUAUCAGAAACGAAUGGGG | 84.1% |
| 4656 | CCAAAAUGCCCUCAAUGGG | 84.1% |
| 4657 | UAUCAGAAACGAAUGGGGG | 84.1% |
| 4658 | ACGGAAGGAGUACCUGAGU | 84.0% |
| 4659 | UUUGGCCUGGUAUGUGCAA | 84.0% |
| 4660 | UACGGAAGGAGUACCUGAG | 83.9% |
| 4661 | CGGAAGGAGUACCUGAGUC | 83.9% |
| 4662 | UCUACGGAAGGAGUACCUG | 83.7% |
| 4663 | CACUUGCCAGUUGCAUGGG | 83.7% |
| 4664 | GCACUUGCCAGUUGCAUGG | 83.7% |
| 4665 | CUACGGAAGGAGUACCUGA | 83.7% |
| 4666 | UUCUACGGAAGGAGUACCU | 83.7% |
| 4667 | GGAAGGAGUACCUGAGUCU | 83.7% |
| 4668 | GGUGCACUUGCCAGUUGCA | 83.6% |
| 4669 | GUGCACUUGCCAGUUGCAU | 83.6% |
| 4670 | UGCACUUGCCAGUUGCAUG | 83.6% |
| 4671 | AGUACCUGAGUCUAUGAGG | 83.5% |
| 4672 | GGAGUACCUGAGUCUAUGA | 83.5% |
| 4673 | GAGUACCUGAGUCUAUGAG | 83.5% |
| 4674 | CAGCAGAAUGCUGUGGAUG | 83.4% |
| 4675 | AGGAGUACCUGAGUCUAUG | 83.3% |
| 4676 | GAAGGAGUACCUGAGUCUA | 83.2% |
| 4677 | ACAGCAGAAUGCUGUGGAU | 83.1% |
| 4678 | GGAACAGCAGAAUGCUGUG | 83.1% |
| 4679 | GAACAGCAGAAUGCUGUGG | 83.1% |
| 4680 | AACAGCAGAAUGCUGUGGA | 83.1% |
| 4681 | AAGGAGUACCUGAGUCUAU | 83.1% |
| 4682 | CUUGCCAGUUGCAUGGGCC | 82.7% |
| 4683 | UUGCCAGUUGCAUGGGCCU | 82.7% |
| 4684 | AGGAACAGCAGAAUGCUGU | 82.7% |
| 4685 | UGCCAGUUGCAUGGGCCUC | 82.3% |
| 4686 | GCCAGUUGCAUGGGCCUCA | 82.3% |
| 4687 | CCAGUUGCAUGGGCCUCAU | 82.3% |
| 4688 | CAGUUGCAUGGGCCUCAUA | 82.1% |
| 4689 | UGAGUCUAUGAGGGAAGAA | 82.1% |
| 4690 | ACUUGCCAGUUGCAUGGGC | 82.1% |
| 4691 | UGGUGCACUUGCCAGUUGC | 82.0% |
| 4692 | AAGAUGUCUOUGCUGGGAA | 81.9% |
| 4693 | UGAAGAUGUCUUUGCUGGG | 81.9% |
| 4694 | GAAGAUGUCUUUGCUGGGA | 81.9% |
| 4695 | GUAUCAUUGGGAUCUUGCA | 81.5% |
| 4696 | AGUAUCAUUGGGAUCUUGC | 81.5% |
| 4697 | AAAUGGUGCAGGCAAUGAG | 81.1% |
| 4698 | GCAGAAUGCUGUGGAUGCU | 81.1% |
| 4699 | GGACUCAUCCUAGCUCCAG | 81.1% |
| 4700 | AGAAUGCUGUGGAUGCUGA | 81.1% |
| 4701 | AGCAGAAUGCUGUGGAUGC | 81.1% |
| 4702 | GAAUGCUGUGGAUGCUGAC | 81.1% |
| 4703 | CGAGUAUCAUUGGGAUCUU | 81.1% |
| 4704 | GGGACUCAUCCUAGCUCCA | 81.1% |
| 4705 | CAGAAUGCUGUGGAUGCUG | 81.1% |
| 4706 | GCGAGUAUCAUUGGGAUCU | 81.1% |
| 4707 | UGGGACUCAUCCUAGCUCC | 81.0% |
| 4708 | CAAAUGGUGCAGGCAAUGA | 81.0% |
| 4709 | GAGUAUCAUUGGGAUCUUG | 81.0% |
| 4710 | GACUCAUCCUAGCUCCAGU | 80.9% |
| 4711 | AAUGCUGUGGAUGCUGACG | 80.5% |
| 4712 | AGGCAAAUGGUGCAGGCAA | 80.2% |
| 4713 | GCAAAUGGUGCAGGCAAUG | 80.2% |
| 4714 | GGCAAAUGGUGCAGGCAAU | 80.2% |
| 4715 | AUGCUGUGGAUGCUGACGA | 80.1% |
| 4716 | CUGACUAAGGGGAUUUUGG | 79.8% |
| 4717 | UCUGACUAAGGGGAUUUUG | 79.8% |
| 4718 | UGCACUUGAUAUUGUGGAU | 79.8% |
| 4719 | UGACUAAGGGGAUUUUGGG | 79.8% |
| 4720 | GCACUUGAUAUUGUGGAUU | 79.8% |
| 4721 | UUGCACUUGAUAUUGUGGA | 79.6% |
| 4722 | CGUAUGUUCUCUCUAUCGU | 79.2% |
| 4723 | GAAACGUAUGUUCUCUCUA | 79.2% |
| 4724 | AUAUUGUGGAUUCUUGAUC | 79.2% |
| 4725 | ACGUAUGUUCUCUCUAUCG | 79.2% |
| 4726 | AACGUAUGUUCUCUCUAUC | 79.2% |
| 4727 | AAACGUAUGUUCUCUCUAU | 79.2% |
| 4728 | CCAGGCAAAUGGUGCAGGC | 79.1% |
| 4729 | GAUAUUGUGGAUUCUUGAU | 79.1% |
| 4730 | UGAUAUUGUGGAUUCUUGA | 79.1% |
| 4731 | AGGUCGAAACGUAUGUUCU | 79.1% |
| 4732 | GAGGUCGAAACGUAUGUUC | 79.1% |
| 4733 | GGUCGAAACGUAUGUUCUC | 79.1% |
| 4734 | GUCGAAACGUAUGUUCUCU | 79.1% |
| 4735 | CGAAACGUAUGUUCUCUCU | 79.1% |
| 4736 | UCGAAACGUAUGUUCUCUC | 79.1% |
| 4737 | UAUUGUGGAUUCUUGAUCG | 79.0% |
| 4738 | CACUUGAUAUUGUGGAUUC | 78.9% |
| 4739 | ACUUGAUAUUGUGGAUUCU | 78.9% |
| 4740 | CUUGAUAUUGUGGAUUCUU | 78.9% |
| 4741 | GCCAGGCAAAUGGUGCAGG | 78.9% |
| 4742 | UUGAUAUUGUGGAUUCUUG | 78.7% |
| 4743 | CGCAGAGACUUGAAGAUGU | 78.7% |
| 4744 | GCGCAGAGACUUGAAGAUG | 78.7% |
| 4745 | GGCCAGGCAAAUGGUGCAG | 78.6% |
| 4746 | AGGCCAGGCAAAUGGUGCA | 78.6% |
| 4747 | AUUGUGGAUUCUUGAUCGU | 78.5% |
| 4748 | UUGUGGAUUCUUGAUCGUC | 78.5% |
| 4749 | CAGGCAAAUGGUGCAGGCA | 78.4% |
| 4750 | GGGCCUUCUACGGAAGGAG | 78.4% |
| 4751 | GGCCUUCUACGGAAGGAGU | 78.4% |
| 4752 | CGCGCAGAGACUUGAAGAU | 78.3% |
| 4753 | UCGCGCAGAGACUUGAAGA | 78.3% |
| 4754 | AUCGCGCAGAGACUUGAAG | 78.2% |
| 4755 | CAGGCCAGGCAAAUGGUGC | 78.1% |
| 4756 | GCAGAGACUUGAAGAUGUC | 77.9% |
| 4757 | AUCCUGUCACCUCUGACUA | 77.9% |
| 4758 | UCCUGUCACCUCUGACUAA | 77.8% |
| 4759 | UCAGGCCAGGCAAAUGGUG | 77.8% |
| 4760 | UAUGUUCUCUCUAUCGUUC | 77.6% |
| 4761 | AGUCAGGCCAGGCAAAUGG | 77.6% |
| 4762 | GUAUGUUCUCUCUAUCGUU | 77.6% |
| 4763 | GUCAGGCCAGGCAAAUGGU | 77.6% |
| 4764 | AUGUUCUCUCUAUCGUUCC | 77.6% |
| 4765 | UAGUCAGGCCAGGCAAAUG | 77.4% |
| 4766 | CUAGUCAGGCCAGGCAAAU | 77.4% |
| 4767 | GCUAGUCAGGCCAGGCAAA | 77.4% |
| 4768 | UGCUAGUCAGGCCAGGCAA | 77.2% |
| 4769 | UUGCUGACUCCCAGCACAG | 77.1% |
| 4770 | AUUGCUGACUCCCAGCACA | 77.1% |
| 4771 | GAUUGCUGACUCCCAGCAC | 77.1% |
| 4772 | GCUGACUCCCAGCACAGGU | 77.1% |
| 4773 | CAGAUGCAACGAUUCAAGU | 77.1% |
| 4774 | CUGACUCCCAGCACAGGUC | 77.1% |
| 4775 | GCAGAUGCAACGAUUCAAG | 77.0% |
| 4776 | UGCUGACUCCCAGCACAGG | 76.9% |
| 4777 | GGAAUGGGGAUCCAAAUAA | 76.8% |
| 4778 | GGGAAUGGGGAUCCAAAUA | 76.8% |
| 4779 | GAGGGCCUUCUACGGAAGG | 76.8% |
| 4780 | AUCUUGCACUUGAUAUUGU | 76.7% |
| 4781 | UCUUGCACUUGAUAUUGUG | 76.7% |
| 4782 | CUUGCACUUGAUAUUGUGG | 76.7% |
| 4783 | AUGGGAAUGGGGAUCCAAA | 76.6% |
| 4784 | AGGGCCUUCUACGGAAGGA | 76.6% |
| 4785 | AAUGGGAAUGGGGAUCCAA | 76.6% |
| 4786 | GAUGCAACGAUUCAAGUGA | 76.5% |
| 4787 | ACAUUCCAUGGGGCCAAAG | 76.5% |
| 4788 | AGAUGCAACGAUUCAAGUG | 76.5% |
| 4789 | AAAAGAGGGCCUUCUACGG | 76.4% |
| 4790 | CAUUCCAUGGGGCCAAAGA | 76.4% |
| 4791 | AGGCAAAUGGUGGCAACAA | 76.4% |
| 4792 | GGCAAAUGGUGGCAACAAC | 76.4% |
| 4793 | CAAAUGGUGGCAACAACCA | 76.3% |
| 4794 | AUUCCAUGGGGCCAAAGAA | 76.3% |
| 4795 | AAAUGGUGGCAACAACCAA | 76.3% |
| 4796 | AACUUAAGAGGGAGAUAAC | 76.2% |
| 4797 | AGAGGGCCUUCUACGGAAG | 76.2% |
| 4798 | UGGGAAUGGGGAUCCAAAU | 76.2% |
| 4799 | AAGAGGGCCUUCUACGGAA | 76.2% |
| 4800 | AAACUUAAGAGGGAGAUAA | 76.2% |
| 4801 | AAAGAGGGCCUUCUACGGA | 76.2% |
| 4802 | CAGUCAUUUUGUCAGCAUA | 76.1% |
| 4803 | CCUGUCACCUCUGACUAAG | 76.0% |
| 4804 | GCAAAUGGUGGCAACAACC | 76.0% |
| 4805 | UGCUGUGGAUGCUGACGAC | 75.9% |
| 4806 | ACAGUCAUUUUGUCAGCAU | 75.8% |
| 4807 | AUCAGGCCCCCUCAAAGCC | 75.6% |
| 4808 | CCAUCAGGCCCCCUCAAAG | 75.6% |
| 4809 | GGAUCUUGCACUUGAUAUU | 75.6% |
| 4810 | CAUCAGGCCCCCUCAAAGC | 75.6% |
| 4811 | GGGAUCUUGCACUUGAUAU | 75.6% |
| 4812 | GAUCUUGCACUUGAUAUUG | 75.5% |
| 4813 | GGAUGCUGACGACAGUCAU | 75.4% |
| 4814 | GCUGUGGAUGCUGACGACA | 75.4% |
| 4815 | AUGCUGACGACAGUCAUUU | 75.4% |
| 4816 | UGGAUGCUGACGACAGUCA | 75.4% |
| 4817 | GAUGCUGACGACAGUCAUU | 75.4% |
| 4818 | CUGUGGAUGCUGACGACAG | 75.3% |
| 4819 | UGCUGACGACAGUCAUUUU | 75.3% |
| 4820 | UGUGGAUGCUGACGACAGU | 75.3% |
| 4821 | GUGGAUGCUGACGACAGUC | 75.3% |
| 4822 | GCCUUCUACGGAAGGAGUA | 75.2% |
| 4823 | GCUGACGACAGUCAUUUUG | 75.1% |
| 4824 | ACGACAGUCAUUUUGUCAG | 75.0% |
| 4825 | GACGACAGUCAUUUUGUCA | 75.0% |
| 4826 | UGACGACAGUCAUUUUGUC | 75.0% |
| 4827 | CUGACGACAGUCAUUUUGU | 75.0% |
| 4828 | GACAGUCAUUUUGUCAGCA | 75.0% |
| 4829 | CGACAGUCAUUUUGUCAGC | 75.0% |
| 4830 | UGGUGGCAACAACCAAUCC | 75.0% |
| 4831 | AAUGGUGGCAACAACCAAU | 74.9% |
| 4832 | GGUGGCAACAACCAAUCCA | 74.9% |
| 4833 | AUGGUGGCAACAACCAAUC | 74.9% |
| 4834 | AAGACAAGACCAAUCCUGU | 74.8% |
| 4835 | CAAGACCAAUCCUGUCACC | 74.8% |
| 4836 | UAGGCAAAUGGUGGCAACA | 74.8% |
| 4837 | GACAAGACCAAUCCUGUCA | 74.8% |
| 4838 | AGACAAGACCAAUCCUGUC | 74.8% |
| 4839 | GACCAAUCCUGUCACCUCU | 74.8% |
| 4840 | AGACCAAUCCUGUCACCUC | 74.8% |
| 4841 | GCUAAAGACAAGACCAAUC | 74.8% |
| 4842 | ACAAGACCAAUCCUGUCAC | 74.8% |
| 4843 | AAGACCAAUCCUGUCACCU | 74.8% |
| 4844 | AUAGGCAAAUGGUGGCAAC | 74.7% |
| 4845 | UAAAGACAAGACCAAUCCU | 74.7% |
| 4846 | AAAGACAAGACCAAUCCUG | 74.7% |
| 4847 | CUAAAGACAAGACCAAUCC | 74.7% |
| 4848 | CAAUCCUGUCACCUCUGAC | 74.6% |
| 4849 | CAUAGGCAAAUGGUGGCAA | 74.6% |
| 4850 | AAGGAACAGCAGAAUGCUG | 74.6% |
| 4851 | CCAAUCCUGUCACCUCUGA | 74.6% |
| 4852 | ACAACCAAUCCAUUAAUAA | 74.5% |
| 4853 | AUAACAUUCCAUGGGGCCA | 74.4% |
| 4854 | UAACAUUCCAUGGGGCCAA | 74.4% |
| 4855 | AGAUAACAUUCCAUGGGGC | 74.4% |
| 4856 | GAGAUAACAUUCCAUGGGG | 74.4% |
| 4857 | AACAUUCCAUGGGGCCAAA | 74.3% |
| 4858 | CAACAACCAAUCCAUUAAU | 74.3% |
| 4859 | AACAACCAAUCCAUUAAUA | 74.3% |
| 4860 | ACCAAUCCUGUCACCUCUG | 74.2% |
| 4861 | GAAAGGAACAGCAGAAUGC | 74.2% |
| 4862 | AAAGGAACAGCAGAAUGCU | 74.2% |
| 4863 | GGGAGAUAACAUUCCAUGG | 74.1% |
| 4864 | CGAAAGGAAOAGCAGAAUG | 74.1% |
| 4865 | GGAGAUAACAUUCCAUGGG | 74.1% |
| 4866 | AAUCCUGUCACCUCUGACU | 74.1% |
| 4867 | AGGGAGAUAACAUUCCAUG | 74.1% |
| 4868 | GAUAACAUUCCAUGGGGCC | 74.1% |
| 4869 | AUCGAAAGGAACAGCAGAA | 74.1% |
| 4870 | UUGAAAAUUUGCAGACCUA | 74.0% |
| 4871 | CUUCUUGAAAAUUUGCAGA | 74.0% |
| 4872 | UCUUGAAAAUUUGCAGACC | 74.0% |
| 4873 | CUUGAAAAUUUGCAGACCU | 74.0% |
| 4874 | UUCUUGAAAAUUUGCAGAC | 74.0% |
| 4875 | UCGAAAGGAACAGCAGAAU | 73.9% |
| 4876 | CCCAGUGAGCGAGGACUGC | 73.7% |
| 4877 | CAUUUUGUCAGCAUAGAGC | 73.7% |
| 4878 | CCAGUGAGCGAGGACUGCA | 73.7% |
| 4879 | GUGCCCAGUGAGCGAGGAC | 73.6% |
| 4880 | GCCCAGUGAGCGAGGACUG | 73.6% |
| 4881 | UGCCCAGUGAGCGAGGACU | 73.6% |
| 4882 | CUUAAGAGGGAGAUAACAU | 73.5% |
| 4883 | UUAAGAGGGAGAUAACAUU | 73.5% |
| 4884 | CACCGUGCCCAGUGAGCGA | 73.4% |
| 4885 | AAUGGUGCAGGCAAUGAGA | 73.4% |
| 4886 | AAGAGGGAGAUAACAUUCC | 73.4% |
| 4887 | CGUGCCCAGUGAGCGAGGA | 73.4% |
| 4888 | CCGUGCCCAGUGAGCGAGG | 73.4% |
| 4889 | GAGGGAGAUAACAUUCCAU | 73.4% |
| 4890 | AGAGGGAGAUAACAUUCCA | 73.4% |
| 4891 | ACCGUGCCCAGUGAGCGAG | 73.4% |
| 4892 | UGUUCUCUCUAUCGUUCCA | 73.1% |
| 4893 | AAAAACACAGAUCUUGAGG | 73.1% |
| 4894 | AUUUUGUCAGCAUAGAGCU | 73.1% |
| 4895 | UUCUCUCUAUCGUUCCAUC | 73.1% |
| 4896 | GUUCUCUCUAUCGUUCCAU | 73.1% |
| 4897 | GGAAAAACACAGAUCUUGA | 73.0% |
| 4898 | AAACACAGAUCUUGAGGCU | 73.0% |
| 4899 | GGGAAAAACACAGAUCUUG | 73.0% |
| 4900 | AAAACACAGAUCUUGAGGC | 73.0% |
| 4901 | UAAGAGGGAGAUAACAUUC | 73.0% |
| 4902 | GAUGUCUUUGCUGGGAAAA | 72.9% |
| 4903 | GAAAAACACAGAUCUUGAG | 72.9% |
| 4904 | UCUCUCUAUCGUUCCAUCA | 72.8% |
| 4905 | UCCAUCAGGCCCCCUCAAA | 72.8% |
| 4906 | UUCCAUCAGGCCCCCUCAA | 72.8% |
| 4907 | CUCUCUAUCGUUCCAUCAG | 72.8% |
| 4908 | GUUCCAUCAGGCCCCCUCA | 72.8% |
| 4909 | UCUAUCGUUCCAUCAGGCC | 72.8% |
| 4910 | UGUCUUUGCUGGGAAAAAC | 72.8% |
| 4911 | UAUCGUUCCAUCAGGCCCC | 72.8% |
| 4912 | GUCUUUGCUGGGAAAAACA | 72.8% |
| 4913 | AUGUCUUUGCUGGGAAAAA | 72.8% |
| 4914 | UCUUUGCUGGGAAAAACAC | 72.8% |
| 4915 | CGUUCCAUCAGGCCCCCUC | 72.8% |
| 4916 | CUAUCGUUCCAUCAGGCCC | 72.8% |
| 4917 | CUCUAUCGUUCCAUCAGGC | 72.8% |
| 4918 | UCGUUCCAUCAGGCCCCCU | 72.8% |
| 4919 | AUCGUUCCAUCAGGCCCCC | 72.8% |
| 4920 | UCUCUAUCGUUCCAUCAGG | 72.8% |
| 4921 | GGAUCAAGUGAGCAGGCAG | 72.7% |
| 4922 | CUAACCGAGGUCGAAACGU | 72.7% |
| 4923 | AUGGCUGGAUCAAGUGAGC | 72.7% |
| 4924 | GAUCAAGUGAGCAGGCAGC | 72.7% |
| 4925 | UGGCUGGAUCAAGUGAGCA | 72.7% |
| 4926 | UUCUAACCGAGGUCGAAAC | 72.6% |
| 4927 | UAACCGAGGUCGAAACGUA | 72.6% |
| 4928 | UCUAACCGAGGUCGAAACG | 72.6% |
| 4929 | GCUGGGAAAAACACAGAUC | 72.6% |
| 4930 | UGCUGGGAAAAACACAGAU | 72.6% |
| 4931 | CAAGUGAGCAGGCAGCGGA | 72.6% |
| 4932 | CAAGUGAGCAGGCAGCGGA | 72.6% |
| 4933 | CUGGGAAAAACACAGAUCU | 72.6% |
| 4934 | UGGUAUGUGCAACAUGUGA | 72.6% |
| 4935 | UUGCUGGGAAAAACACAGA | 72.6% |
| 4936 | AGAUGUCUUUGCUGGGAAA | 72.6% |
| 4937 | UUUGCUGGGAAAAACACAG | 72.6% |
| 4938 | UGGGAAAAACACAGAUCUU | 72.5% |
| 4939 | CUUUGCUGGGAAAAACACA | 72.5% |
| 4940 | CUGGUAUGUGCAACAUGUG | 72.5% |
| 4941 | CUUCUAACCGAGGUCGAAA | 72.5% |
| 4942 | CGAGGACUGCAGCGUAGAC | 72.4% |
| 4943 | GAGCGAGGACUGCAGCGUA | 72.4% |
| 4944 | GAGGACUGCAGCGUAGACG | 72.4% |
| 4945 | UGAGCGAGGACUGCAGCGU | 72.3% |
| 4946 | GGUUUGUGUUCACGCUCAC | 72.2% |
| 4947 | GGGUUUGUGUUCACGCUCA | 72.2% |
| 4948 | CACUCAGUUAUUCUGCUGG | 72.2% |
| 4949 | AAAUGGCUGGAUCAAGUGA | 72.1% |
| 4950 | GCGAGGACUGCA&CGUAGA | 72.1% |
| 4951 | CAAAUGGCUGGAUCAAGUG | 72.1% |
| 4952 | AGUGAGCGAGGACUGCAGC | 72.1% |
| 4953 | GUGAGCGAGGACUGCAGCG | 72.1% |
| 4954 | ACUCAGUUAUUCUGCUGGU | 72.1% |
| 4955 | AGCGAGGACUGCAGCGUAG | 72.1% |
| 4956 | GUUUGUGUUCACGCUCACC | 72.0% |
| 4957 | CAGUGAGCGAGGACUGCAG | 71.9% |
| 4958 | GGAUCCAAAUAACAUGGAC | 71.8% |
| 4959 | GGGAUCCAAAUAACAUGGA | 71.8% |
| 4960 | GCACUCAGUUAUUCUGCUG | 71.8% |
| 4961 | UGGCCUGGUAUGUGCAACA | 71.8% |
| 4962 | GGGGAUCCAAAUAACAUGG | 71.8% |
| 4963 | GCCUGGUAUGUGCAACAUG | 71.8% |
| 4964 | GGCCUGGUAUGUGCAACAU | 71.8% |
| 4965 | CCUGGUAUGUGCAACAUGU | 71.8% |
| 4966 | GAGCAAAUGGCUGGAUCAA | 71.6% |
| 4967 | GGAGCAAAUGGCUGGAUCA | 71.6% |
| 4968 | AGCAAAUGGCUGGAUCAAG | 71.6% |
| 4969 | GCAAAUGGCUGGAUCAAGU | 71.6% |
| 4970 | UGGGGCCAAAGAAAUAGCA | 71.6% |
| 4971 | GGGGCCAAAGAAAUAGCAC | 71.5% |
| 4972 | GGGCCAAAGAAAUAGCACU | 71.5% |
| 4973 | GGCUGGAUCAAGUGAGCAG | 71.5% |
| 4974 | UAGCACUCAGUUAUUCUGC | 71.5% |
| 4975 | AUAGCACUCAGUUAUUCUG | 71.4% |
| 4976 | AAGAAAUAGCACUCAGUUA | 71.4% |
| 4977 | GCUGGAUCAAGUGAGCAGG | 71.4% |
| 4978 | AAAGAAAUAGCACUCAGUU | 71.4% |
| 4979 | CUGGAUCAAGUGAGCAGGC | 71.4% |
| 4980 | AAUAGCACUCAGUUAUUCU | 71.3% |
| 4981 | UGGAUCAAGUGAGCAGGCA | 71.3% |
| 4982 | AGCACUCAGUUAUUCUGCU | 71.3% |
| 4983 | GAAAUAGCACUCAGUUAUU | 71.3% |
| 4984 | AAAUAGCACUCAGUUAUUC | 71.3% |
| 4985 | AAUGGCUGGAUCAAGUGAG | 71.3% |
| 4986 | AAUGGGGAUCCAAAUAACA | 71.2% |
| 4987 | AGAAAUAGCACUCAGUUAU | 71.2% |
| 4988 | UGGGGAUCCAAAUAACAUG | 71.2% |
| 4989 | AUGGGGAUCCAAAUAACAU | 71.2% |
| 4990 | GGCCAAAGAAAUAGCACUC | 71.1% |
| 4991 | GCCAAAGAAAUAGCACUCA | 71.1% |
| 4992 | CCAAAGAAAUAGCACUCAG | 71.1% |
| 4993 | CAAAGAAAUAGCACUCAGU | 70.9% |
| 4994 | GAAUGGGGAUCCAAAUAAC | 70.9% |
| 4995 | CAGGCAGCGGAGGCCAUGG | 70.7% |
| 4996 | AGGCAGCGGAGGCCAUGGA | 70.7% |
| 4997 | GUGAGCAGGCAGCGGAGGC | 70.6% |
| 4998 | AUUGCUAGUCAGGCCAGGC | 70.6% |
| 4999 | AGUGAGCAGGCAGCGGAGG | 70.6% |
| 5000 | AAGUGAGCAGGCAGCGGAG | 70.6% |
| 5001 | GAGCAGGCAGCGGAGGCCA | 70.5% |
| 5002 | GCAGGCAGCGGAGGCCAUG | 70.5% |
| 5003 | AGCAGGCAGCGGAGGCCAU | 70.5% |
| 5004 | UGAGCAGGCAGCGGAGGCC | 70.5% |
| 5005 | AGGACUGCAGCGUAGACGC | 70.4% |
| 5006 | ACAUGUGAACAGAUUGCUG | 70.4% |
| 5007 | CAUGUGAACAGAUUGCUGA | 70.4% |
| 5008 | AUGUGAACAGAUUGCUGAC | 70.2% |
| 5009 | GAUAUUGAAAGAUGAGCCU | 70.2% |
| 5010 | UAUUGAAAGAUGAGCCUUC | 70.2% |
| 5011 | AGAUAUUGAAAGAUGAGCC | 70.2% |
| 5012 | AUUGAAAGAUGAGCCUUCU | 70.2% |
| 5013 | AUAUUGAAAGAUGAGCCUU | 70.2% |
| 5014 | AUGGUUUUGGCCAGCACUA | 70.2% |
| 5015 | UGGUUUUGGCCAGCACUAC | 70.2% |
| 5016 | UAGAUAUUGAAAGAUGAGC | 70.1% |
| 5017 | UGUGCAACAUGUGAACAGA | 70.0% |
| 5018 | CGUCUUUUUUUCAAAUGCA | 70.0% |
| 5019 | UGAAAAGAGGGCCUUCUAC | 70.0% |
| 5020 | GUGCAACAUGUGAACAGAU | 70.0% |

TABLE 2-8

Conserved 19-mer sequences that are present
in at least 70% of the Influenza A segment 2
(NS1 & NS2) sequences listed in Table 1-8.

| Seq | | |
|---|---|---|
| ID | Sequence | Percent |
| 5021 | AUAACACAGUUCGAGUCUC | 98.2% |
| 5022 | UAACACAGUUCGAGUCUCU | 98.2% |
| 5023 | UGAAUGGAAUGAUAACACA | 98.0% |
| 5024 | GAAUGGAAUGAUAACACAG | 98.0% |
| 5025 | UGGAAUGAUAACACAGUUC | 98.0% |
| 5026 | AUGGAAUGAUAACACAGUU | 97.9% |
| 5027 | AAUGGAAUGAUAACACAGU | 97.9% |
| 5028 | UUGAAUGGAAUGAUAACAC | 97.8% |
| 5029 | UGAUAACACAGUUCGAGUC | 97.7% |
| 5030 | AUGAUAACACAGUUCGAGU | 97.6% |
| 5031 | GGAAUGAUAACACAGUUCG | 97.6% |
| 5032 | GAAUGAUAACACAGUUCGA | 97.6% |
| 5033 | AAUGAUAACACAGUUCGAG | 97.6% |
| 5034 | CUUGAAUGGAAUGAUAACA | 97.5% |
| 5035 | GAUAACACAGUUCGAGUCU | 97.1% |
| 5036 | AUGUCAAAAAUGCAAUUGG | 96.9% |
| 5037 | GGAUGUCAAAAAUGCAAUU | 96.9% |
| 5038 | AGGAUGUCAAAAAUGCAAU | 96.9% |
| 5039 | GAGGAUGUCAAAAAUGCAA | 96.8% |
| 5040 | GAUGUCAAAAAUGCAAUUG | 96.8% |
| 5041 | UGAGGAUGUCAAAAAUGCA | 96.4% |
| 5042 | CGGCUUCGCCGAGAUCAGA | 96.2% |
| 5043 | UGUCAAAAAUGCAAUUGGG | 95.6% |
| 5044 | UCUACAGAGAUUCGCUUGG | 95.5% |
| 5045 | GCAAUUGGGGUCCUCAUCG | 94.8% |
| 5046 | CAAUUGGGGUCCUCAUCGG | 94.8% |
| 5047 | UGCAAUUGGGGUCCUCAUC | 94.8% |
| 5048 | UCAAAAAUGCAAUUGGGGU | 94.4% |
| 5049 | GUCAAAAAUGCAAUUGGGG | 94.4% |
| 5050 | AAAAAUGCAAUUGGGGUCC | 94.3% |
| 5051 | AAAAUGCAAUUGGGGUCCU | 94.3% |
| 5052 | AUGCAAUUGGGGUCCUCAU | 94.3% |
| 5053 | CAAAAAUGCAAUUGGGGUC | 94.3% |
| 5054 | AAAUGCAAUUGGGGUCCUC | 94.3% |
| 5055 | AAUGCAAUUGGGGUCCUCA | 94.2% |
| 5056 | UGAAAGCGAAUUUCAGUGU | 93.8% |
| 5057 | UUGAUCGGCUUCGCCGAGA | 93.7% |
| 5058 | CUUGAUCGGCUUCGCCGAG | 93.6% |
| 5059 | GAAAGCGAAUUUCAGUGUG | 93.6% |
| 5060 | AUCGGCUUCGCCGAGAUCA | 93.4% |
| 5061 | GAUCGGCUUCGCCGAGAUC | 93.4% |
| 5062 | UGAUCGGCUUCGCCGAGAU | 93.4% |
| 5063 | UCGGCUUCGCCGAGAUCAG | 93.2% |
| 5064 | GAGCAAUUGUUGGCGAAAU | 92.8% |
| 5065 | GGAGCAAUUGUUGGCGAAA | 92.8% |
| 5066 | UUCCUUGAUCGGCUUCGCC | 92.7% |
| 5067 | UCCUUGAUCGGCUUCGCCG | 92.7% |
| 5068 | GGGAGCAAUUGUUGGCGAA | 92.7% |
| 5069 | AGGGAGCAAUUGUUGGCGA | 92.5% |
| 5070 | CCUUGAUCGGCUUCGCCGA | 92.4% |
| 5071 | GAGGGAGCAAUUGUUGGCG | 92.3% |
| 5072 | AGGGCUUUCACCGAAGAGG | 92.3% |
| 5073 | GGGCUUUCACCGAAGAGGG | 92.2% |
| 5074 | AUAAGAUGGCUGAUUGAAG | 92.1% |
| 5075 | UAAGAUGGCUGAUUGAAGA | 92.1% |
| 5076 | AAGAUGGCUGAUUGAAGAA | 91.9% |
| 5077 | CUAAGGGCUUUCACCGAAG | 91.9% |
| 5078 | AAGGGCUUUCACCGAAGAG | 91.8% |
| 5079 | UAAGGGCUUUCACCGAAGA | 91.8% |
| 5080 | GAUGGCUGAUUGAAGAAGU | 91.7% |
| 5081 | AGAUGGCUGAUUGAAGAAG | 91.7% |
| 5082 | ACUAAGGGCUUUCACCGAA | 91.4% |
| 5083 | UACUAAGGGCUUOCACCGA | 91.3% |
| 5084 | AAAGCGAAUUUCAGUGUGA | 91.2% |
| 5085 | AAGCGAAUUUCAGUGUGAU | 91.0% |
| 5086 | GGCUUUCACCGAAGAGGGA | 90.9% |
| 5087 | GCUUUCACCGAAGAGGGAG | 90.8% |
| 5088 | AUUACUAAGGGCUUUCACC | 90.8% |
| 5089 | UUACUAAGGGCUUUCACCG | 90.8% |
| 5090 | AAGAGGGAGCAAOUGUUGG | 90.4% |
| 5091 | GAAGAGGGAGCAAUUGUUG | 90.4% |
| 5092 | AGAGGGAGCAAUUGUUGGC | 90.3% |
| 5093 | UCACCGAAGAGGGAGCAAU | 90.3% |
| 5094 | UUUCACCGAAGAGGGAGCA | 90.2% |
| 5095 | UUCACCGAAGAGGGAGCAA | 90.2% |
| 5096 | CUUUCACCGAAGAGGGAGC | 90.1% |
| 5097 | CCGAAGAGGGAGCAAUUGU | 90.0% |
| 5098 | ACCGAAGAGGGAGCAAUUG | 90.0% |
| 5099 | CGAAGAGGGAGCAAUUGUU | 90.0% |
| 5100 | CACCGAAGAGGGAGCAAUU | 90.0% |
| 5101 | UUGGGGUCCUCAUCGGAGG | 89.7% |
| 5102 | AUUGGGGUCCUCAUCGGAG | 88.8% |
| 5103 | AAUUGGGGUCCUCAUCGGA | 87.8% |
| 5104 | AUGAGGCACUUAAAAUGAC | 87.7% |
| 5105 | AACACAGUUCGAGUCUCUA | 87.5% |
| 5106 | ACACAGUUCGAGUCUCUAA | 87.5% |
| 5107 | GAUGAGGCACUUAAAAUGA | 87.3% |
| 5108 | ACAGAAACGGAAAAUGGCG | 87.1% |
| 5109 | ACAGUUCGAGUCUCUAAAA | 86.9% |
| 5110 | CACAGUUCGAGUCUCUAAA | 86.9% |
| 5111 | AAGCAGUAAUGAGAAUGGG | 86.1% |
| 5112 | UGAGGCACUUAAAAUGACC | 86.0% |
| 5113 | GAAGCAGUAAUGAGAAUGG | 85.8% |
| 5114 | GGUUCAUGCUAAUGCCCAA | 85.8% |
| 5115 | GAGGCACUUAAAAUGACCA | 85.8% |
| 5116 | AGGCACUUAAAAUGACCAU | 85.8% |
| 5117 | ACUGGUUCAUGCUAAUGCC | 85.7% |
| 5118 | UGGUUCAUGCUAAUGCCCA | 85.7% |
| 5119 | CUGGUUCAUGCUAAUGCCC | 85.5% |
| 5120 | GGCACUUAAAAUGACCAUG | 85.3% |
| 5121 | UUGAAAGCGAAUUUCAGUG | 85.2% |
| 5122 | GCACUUAAAAUGACCAUGG | 85.2% |
| 5123 | UCAUGCUAAUGCCCAAGCA | 85.1% |
| 5124 | UACAGAGAUUCGCUUGGAG | 84.7% |
| 5125 | UACUAUUGAGGAUGUCAAA | 84.7% |
| 5126 | ACAGAGAUUCGCUUGGAGA | 84.7% |
| 5127 | CAUACUAUUGAGGAUGUCA | 84.7% |
| 5128 | GUUCAUGCUAAUGCCCAAG | 84.7% |
| 5129 | AUACUAUUGAGGAUGUCAA | 84.7% |
| 5130 | UUCAUGCUAAUGCCCAAGC | 84.7% |
| 5131 | UGGCUGAUUGAAGAAGUGA | 84.7% |
| 5132 | GGCUGAUUGAAGAAGUGAG | 84.7% |
| 5133 | ACUAUUGAGGAUGUCAAAA | 84.6% |
| 5134 | ACAUACUAUUGAGGAUGUC | 84.5% |
| 5135 | CAGAGAUUCGCUUGGAGAA | 84.5% |
| 5136 | UUCCAGGACAUACUAUUGA | 84.4% |
| 5137 | UUGAGGAUGUCAAAAAUGC | 84.4% |
| 5138 | CAGGACAUACUAUUGAGGA | 84.4% |
| 5139 | GGACAUACUAUUGAGGAUG | 84.4% |
| 5140 | AGGACAUACUAUUGAGGAU | 84.4% |
| 5141 | CCAGGACAUACUAUUGAGG | 84.4% |
| 5142 | GACAUACUAUUGAGGAUGU | 84.4% |
| 5143 | UCCAGGACAUACUAUUGAG | 84.4% |
| 5144 | AUGGCUGAUUGAAGAAGUG | 84.3% |
| 5145 | CUAUUGAGGAUGUCAAAAA | 84.2% |
| 5146 | AUUGAGGAUGUCAAAAAUG | 84.2% |
| 5147 | UAUUGAGGAUGUCAAAAAU | 84.2% |
| 5148 | UAUUACUAAGGGCUUUCAC | 84.1% |
| 5149 | CCAUUCCUUGAUCGGCUUC | 84.0% |
| 5150 | AUUCCUUGAUCGGCUUCGC | 83.8% |
| 5151 | GAGAUUCGCUUGGAGAAGC | 83.8% |
| 5152 | AGAGAUUCGCUUGGAGAAG | 83.8% |
| 5153 | CAUUCCUUGAUCGGCUUCG | 83.8% |
| 5154 | CUACAGAGAUUCGCUUGGA | 83.7% |
| 5155 | AGAUUCGCUUGGAGAAGCA | 83.4% |
| 5156 | AUUCGCUUGGAGAAGCAGU | 83.0% |
| 5157 | GUGAUGCCCCAUUCCUUGA | 83.0% |
| 5158 | GAUUCGCUUGGAGAAGCAG | 83.0% |
| 5159 | UUGGAGAAGCAGUAAUGAG | 82.7% |
| 5160 | CUUGGAGAAGCAGUAAUGA | 82.7% |
| 5161 | GAAGAGAUAAGAUGGCUGA | 82.1% |
| 5162 | AAGAGAUAAGAUGGCUGAU | 82.1% |
| 5163 | AGAUAAGAUGGCUGAUUGA | 82.0% |
| 5164 | GAUAAGAUGGCUGAUUGAA | 81.9% |
| 5165 | GUUGAAAGCGAAUUUCAGU | 81.9% |
| 5166 | GCUUGGAGAAGCAGUAAUG | 81.9% |
| 5167 | UGGAGAAGCAGUAAUGAGA | 81.9% |
| 5168 | GAGAUAAGAUGGCUGAUUG | 81.9% |
| 5169 | UUCGCUUGGAGAAGCAGUA | 81.9% |
| 5170 | AGAGAUAAGAUGGCUGAUU | 81.8% |
| 5171 | UCGCUUGGAGAAGCAGUAA | 81.7% |
| 5172 | CGCUUGGAGAAGCAGUAAU | 81.7% |
| 5173 | CAUGUUGAAAGCGAAUUUC | 81.6% |
| 5174 | UCAUGUUGAAAGCGAAUUU | 81.6% |
| 5175 | UGUUGAAAGCGAAUUUCAG | 81.6% |
| 5176 | UAACUGACAUGACUAUUGA | 81.6% |
| 5177 | AUGUUGAAAGCGAAUUUCA | 81.6% |
| 5178 | CAAAACAGAAACGGAAAAU | 81.5% |
| 5179 | AAAACAGAAACGGAAAAUG | 81.5% |
| 5180 | AAACAGAAACGGAAAAUGG | 81.5% |
| 5181 | UCCAAAACAGAAACGGAAA | 81.5% |
| 5182 | CUCCAAAACAGAAACGGAA | 81.4% |
| 5183 | AUCAUGUUGAAAGCGAAUU | 81.4% |
| 5284 | CAUCAUGUUGAAAGCGAAU | 81.3% |
| 5185 | AUGCCCCAUUCCUUGAUCG | 81.3% |
| 5186 | GAUGCCCCAUUCCUUGAUC | 81.3% |
| 5187 | GGCGAAAUCUCACCAUUGC | 81.2% |
| 5188 | UUGUUGGCGAAAUCUCACC | 81.1% |
| 5189 | UUGGCGAAAUCUCACCAUU | 81.0% |
| 5190 | AGAAACGGAAAAUGGCGAG | 81.0% |
| 5191 | UGUUGGCGAAAUCUCACCA | 81.0% |
| 5192 | UGAUUGAAGAAGUGAGACA | 81.0% |
| 5193 | GAAACGGAAAAUGGCGAGA | 80.9% |
| 5194 | UGGCGAAAUCUCACCAUUG | 80.9% |
| 5195 | CCAAAACAGAAACGGAMA | 80.9% |
| 5196 | AUUGUUGGCGAAAUCUCAC | 80.9% |
| 5197 | AAUUGUUGGCGAAAUCUCA | 80.9% |
| 5198 | UGACUAUUGAGGAAUUGUC | 80.9% |
| 5199 | GUUGGCGAAAUCUCACCAU | 80.9% |
| 5200 | CUAUUGAGGAAUUGUCAAG | 80.8% |
| 5201 | ACUAUUGAGGAAUUGUCAA | 80.8% |
| 5202 | CAGAAACGGAAAAUGGCGA | 80.8% |
| 5203 | GACUAUUGAGGAAUUGUCA | 80.8% |
| 5204 | ACAUCAUGUUGAAAGCGAA | 80.7% |
| 5205 | CCCCAUUCCUUGAUCGGCU | 80.7% |
| 5206 | ACGGAAAAUGGCGAGAACA | 80.5% |
| 5207 | UGCCCCAUUCCUUGAUCGG | 80.5% |
| 5208 | AACGGAAAAUGGCGAGAAC | 80.5% |
| 3209 | GCCCCAUUCCUUGAUCGGC | 80.4% |
| 5210 | AUGACUAUUGAGGAAUUGU | 80.4% |
| 5211 | AAAUCUCACCAUUGCCUUC | 80.4% |
| 5212 | AAACGGAAAAUGGCGAGAA | 80.4% |
| 5213 | GAAAUCUCACCAUUGCCUU | 80.4% |
| 5214 | CGAAAUCUCACCAUUGCCU | 80.3% |
| 5215 | AACAUCAUGUUGAAAGCGA | 80.3% |
| 5216 | GCAAUUGUUGGCGAAAUCU | 80.3% |
| 5217 | CAAUUGUUGGCGAAAUCUC | 80.2% |
| 5218 | GCGAAAUCUCACCAUUGCC | 80.2% |
| 5219 | CCCAUUCCUUGAUCGGCUU | 80.2% |
| 5220 | AUUGAAGAAGUGAGACACA | 80.1% |
| 5221 | AAUCUCACCAUUGCCUUCU | 80.0% |
| 5222 | AACAGAAACGGAAAAUGGC | 80.0% |
| 5223 | UGAUGCCCCAUUCCUUGAU | 80.0% |
| 5224 | GCUGAUUGAAGAAGUGAGA | 79.6% |
| 5225 | CUGAUUGAAGAAGUGAGAC | 79.6% |
| 5226 | UUCUUUUCCAGGACAUACU | 79.3% |
| 5227 | ACUCCAAAACAGAAACGGA | 79.3% |
| 5228 | UCCCUAAGGGGAAGAGGCA | 79.3% |
| 5229 | AGCAAUUGUUGGCGAAAUC | 79.1% |
| 5230 | UCUUUUCCAGGACAUACUA | 79.1% |
| 5231 | GAUUGAAGAAGUGAGACAC | 78.8% |
| 5232 | AUUCCAACACUGUGUCAAG | 78.6% |
| 5233 | CUUCUUUUCCAGGACAUAC | 78.5% |
| 5234 | ACCAUUGCCUUCUUUUCCA | 78.5% |
| 5235 | CCAUUGCCUUCUUUUCCAG | 78.5% |
| 5236 | CAUUGCCUUCUUUUCCAGG | 78.4% |
| 5237 | CCUUCUUUUCCAGGACAUA | 78.4% |
| 5238 | GCCUUCUUUUCCAGGACAU | 78.4% |
| 5239 | UGCCUUCUUUUCCAGGACA | 78.4% |
| 5240 | CACCAUUGCCUUCUUUUCC | 78.3% |
| 5241 | UUGCCUUCUUUUCCAGGAC | 78.3% |
| 5242 | UGGAUUCCAACACUGUGUC | 78.3% |
| 5243 | AUGGAUUCCAACACUGUGU | 78.3% |
| 5244 | UCACCAUUGCCUUCUUUUC | 78.3% |
| 5245 | GGAUUCCAACACUGUGUCA | 78.3% |
| 5246 | AUUGCCUUCUUUUCCAGGA | 78.2% |
| 5247 | GAUUCCAACACUGUGUCAA | 78.2% |
| 5248 | UUGAAGAAGUGAGACACAG | 77.8% |
| 5249 | UUGAAGUGGAACAGGAGAU | 77.7% |
| 5250 | UUUGAAGUGGAACAGGAGA | 77.7% |
| 5251 | UGAAGAAGUGAGACACAGA | 77.2% |
| 5252 | CUGACAUGACUAUUGAGGA | 77.2% |
| 5253 | UGACAUGACUAUUGAGGAA | 77.2% |
| 5254 | CAAAUAACAUUCAUGCAAG | 77.0% |
| 5255 | AAAUAACAUUCAUGCAAGC | 77.0% |
| 5256 | ACUGACAUGACUAUUGAGG | 77.0% |
| 5257 | CUUUUCCAGGACAUACUAU | 76.9% |
| 5258 | UUUUCCAGGACAUACUAUU | 76.9% |
| 5259 | UUUCCAGGACAUACUAUUG | 76.8% |
| 5260 | AAACAAGUUGUAGACCAAG | 76.8% |
| 5261 | ACAAGUUGUAGACCAAGAA | 76.7% |
| 5262 | AAGUUGUAGACCAAGAACU | 76.7% |
| 5263 | AACAAGUUGUAGACCAAGA | 76.7% |
| 5264 | GAAUCUGAUGAGGCACUUA | 76.7% |
| 5265 | AGAAUCUGAUGAGGCACUU | 76.6% |
| 5266 | AACUGACAUGACUAUUGAG | 76.5% |
| 5267 | AAUCUGAUGAGGCACUUAA | 76.5% |
| 5268 | UCUGAUGAGGCACUUAAAA | 76.5% |
| 5269 | UGAUGAGGCACUUAAAAUG | 76.5% |
| 5270 | CUGAUGAGGCACUOAAAAU | 76.5% |
| 5271 | CAAGUUGUAGACCAAGAAC | 76.5% |
| 5272 | CCACCCAUGUUGGAAAGCA | 76.2% |
| 5273 | AUCUGAUGAGGCACUUAAA | 76.2% |
| 5274 | AGCCACCCAUGUUGGAAAG | 76.2% |
| 5275 | GCCACCCAUGUUGGAAAGC | 76.2% |
| 5276 | CAGCCACCCAUGUUGGAAA | 76.2% |
| 5277 | GAAGUGGAACAGGAGAUAA | 76.0% |
| 5278 | AAGUGGAACAGGAGAUAAG | 75.9% |
| 5279 | UGAAGUGGAACAGGAGAUA | 75.8% |
| 5280 | AGGAGAUAAGAACUUUCUC | 75.8% |
| 5281 | GAACAGGAGAUAAGAACUU | 75.8% |
| 5282 | CAGGAGAUAAGAACUUUCU | 75.8% |
| 5283 | ACAGGAGAUAAGAACUUUC | 75.7% |
| 5284 | AACAGGAGAUAAGAACUUU | 75.7% |
| 5285 | GUGGAACAGGAGAUAAGAA | 75.6% |
| 5286 | UGGAACAGGAGAUAAGAAC | 75.6% |
| 5287 | GGAACAGGAGAUAAGAACU | 75.6% |
| 5288 | GGAGAAGCAGUAAUGAGAA | 75.6% |
| 5289 | GUCCCUAAGGGGAAGAGGC | 75.4% |
| 5290 | ACUUACUCCAAAACAGAAA | 75.4% |
| 5291 | GAGAAGCAGUAAUGAGAAU | 75.3% |
| 5292 | CCAACACUGUGUCAAGUUU | 75.3% |
| 5293 | AGAAGCAGUAAUGAGAAUG | 75.3% |
| 5294 | AGUGGAACAGGAGAUAAGA | 75.3% |
| 5295 | CUUACUCCAAAACAGAAAC | 75.2% |
| 5296 | CUCACCAUUGCCUUCUUUU | 75.1% |
| 5297 | UCUCACCAUUGCCUUCUUU | 75.1% |
| 5298 | AUCUCACCAUUGCCUUCUU | 75.1% |
| 5299 | UCCAACACUGUGUCAAGUU | 75.0% |
| 5300 | UACUCCAAAACAGAAACGG | 74.8% |
| 5301 | UUACUCCAAAACAGAAACG | 74.8% |
| 5302 | UUCCAACACUGUGUCAAGU | 74.7% |
| 5303 | AUCAGAAUGGACCAGGCAA | 74.5% |
| 5304 | UAAUGAGAAUGGGGGACCU | 74.0% |
| 5305 | UAAUGGAUUCCAACACUGU | 74.0% |
| 5306 | CAAGUUUCCAGGUAGAUUG | 74.0% |
| 5307 | CAUAAUGGAUUCCAACACU | 73.9% |
| 5308 | CAGUAAUGAGAAUGGGGGA | 73.9% |
| 5309 | GCAGUAAUGAGAAUGGGGG | 73.9% |
| 5310 | UCAAGUUUCCAGGUAGAUU | 73.9% |
| 5311 | AAUGGAUUCCAACACUGUG | 73.9% |
| 5312 | ACAUAAUGGAUUCCAACAC | 73.9% |
| 5313 | AGUAAUGAGAAUGGGGGAC | 73.8% |
| 5314 | AAUGAGAAUGGGGGACCUC | 73.8% |
| 5315 | GUAAUGAGAAUGGGGGACC | 73.7% |
| 5316 | AGCAGUAAUGAGAAUGGGG | 73.7% |
| 5317 | UGUCAAGUUUCCAGGUAGA | 73.7% |
| 5318 | CCACACCUGCUUCGCGAUA | 73.6% |
| 5319 | UCCACACCUGCUUCGCGAU | 73.6% |
| 5320 | ACAUGACUAUUGAGGAAUU | 73.6% |
| 5321 | CUCCACACCUGCUUCGCGA | 73.6% |
| 5322 | CACACCUGCUUCGCGAUAC | 73.6% |
| 5323 | UGUGUCAAGUUOCCAGGUA | 73.6% |
| 5324 | GACAUGACUAUUGAGGAAU | 73.6% |
| 5325 | GUGUCAAGUUUCCAGGUAG | 73.6% |
| 5326 | ACUGUGUCAAGUUUCCAGG | 73.5% |
| 5327 | CUGUGUCAAGUUUCCAGGU | 73.5% |
| 5328 | AUAAUGGAUUCCAACACUG | 73.5% |
| 5329 | GUCAAGUUUCCAGGUAGAU | 73.5% |
| 5330 | CACCUGCUUCGCGAUACAU | 73.5% |
| 5331 | ACACCUGCUUCGCGAUACA | 73.4% |
| 5332 | CAUCAGAAUGGACCAGGCA | 73.4% |
| 5333 | GGCUUCGCCGAGAUCAGAG | 73.4% |
| 5334 | GCAUCAGAAUGGACCAGGC | 73.3% |
| 5335 | GCUUCGCGAUACAUAACUG | 73.3% |
| 5336 | CACUGUGUCAAGUUUCCAG | 73.3% |
| 5337 | ACACUGUGUCAAGUUUCCA | 73.3% |
| 5338 | AACACUGUGUCAAGUUUCC | 73.3% |
| 5339 | CUUCGCGAUACAUAACUGA | 73.3% |
| 5340 | UGGACCAGGCAAUCAUGGA | 73.2% |
| 5341 | CGGAAAAUGGCGAGAACAG | 73.2% |
| 5342 | AAUGGCGAGAACAGCUAGG | 73.2% |
| 5343 | CCUGCUUCGCGAUACAUAA | 73.2% |
| 5344 | UGCAUCAGAAUGGACCAGG | 73.2% |
| 5345 | UGCUUCGCGAUACAUAACU | 73.2% |
| 5346 | CUGCUUCGCGAUACAUAAC | 73.2% |
| 5347 | UGGCGAGAACAGCUAGGUC | 73.1% |
| 5348 | ACCUGCUUCGCGAUACAUA | 73.1% |
| 5349 | AUGGCGAGAACAGCUAGGU | 73.1% |
| 5350 | AAAUGGCGAGAACAGCUAG | 73.1% |
| 5351 | UAUUGAGGAAUUGUCAAGA | 73.0% |
| 5352 | AUGGACCAGGCAAUCAUGG | 73.0% |
| 5353 | UCAGAAUGGACCAGGCAAU | 72.9% |
| 5354 | GCGAGAACAGCUAGGUCAA | 72.8% |
| 5355 | GAGAACAGCUAGGUCAAAA | 72.8% |
| 5356 | CGAGAACAGCUAGGUCAAA | 72.8% |
| 5357 | GGCGAGAACAGCUAGGUCA | 72.8% |
| 5358 | AAUGGACCAGGCAAUCAUG | 72.7% |
| 5359 | AAGCAGCCACCCAUGUUGG | 72.7% |
| 5360 | GAAUGGACCAGGCAAUCAU | 72.6% |
| 5361 | UCAAGAAACUGGUUCAUGC | 72.6% |
| 5362 | GCAGCCACCCAUGUUGGAA | 72.6% |
| 5363 | AGCAGCCACCCAUGUUGGA | 72.6% |
| 5364 | CAAGAAACUGGUUCAUGCU | 72.6% |
| 5365 | GACCUCCACUUACUCCAAA | 72.5% |
| 5366 | AACUGGUUCAUGCUAAUGC | 72.5% |
| 5367 | AGAAUGGACCAGGCAAUCA | 72.5% |
| 5368 | CACUUACUCCAAAACAGAA | 72.5% |
| 5369 | UCCACUUACUCCAAAACAG | 72.4% |
| 5370 | CAGAAUGGACCAGGCAAUC | 72.4% |
| 5371 | CCACUUACUCCAAAACAGA | 72.3% |
| 5372 | GAAACUGGUUCAUGCUAAU | 72.3% |
| 5373 | AGAAACUGGUUCAUGCUAA | 72.3% |
| 5374 | AAACUGGUUCAUGCUAAUG | 72.3% |
| 5375 | CUCCACUUACUCCAAAACA | 72.3% |
| 5376 | CAUGACUAUUGAGGAAUUG | 72.2% |
| 5377 | AAGAAACUGGUUCAUGCUA | 72.2% |
| 5378 | CAGGUAGAUUGCUUUCUUU | 72.1% |
| 5379 | CCUCCACUUACUCCAAAAC | 72.1% |
| 5380 | ACCUCCACUUACUCCAAAA | 72.1% |
| 5381 | AGGUAGAUUGCUUUCUUUG | 72.1% |
| 5382 | GGUAGAUUGCUUUCUUUGG | 72.1% |
| 5383 | UAGAUUGCUUUCUUUGGCA | 72.0% |
| 5384 | GUAGAUUGCUUUCUUUGGC | 72.0% |
| 5385 | CAACACUGUGUCAAGUUUC | 71.9% |
| 5386 | AGAUUGCUUUCUUUGGCAU | 71.9% |
| 5387 | AACAGCUAGGUCAAAAGUU | 71.8% |
| 5388 | AAUCUACAGAGAUUCGCUU | 71.8% |
| 5389 | GAACAGCUAGGUCAAAAGU | 71.8% |
| 5390 | AUCUACAGAGAUUCGCUUG | 71.7% |
| 5391 | AGUUUCCAGGUAGAUUGCU | 71.6% |
| 5392 | GUUUCCAGGUAGAUUGCUU | 71.6% |
| 5393 | AAGUUUCCAGGUAGAUUGC | 71.5% |
| 5394 | AGAACAGCUAGGUCAAAAG | 71.5% |
| 5395 | UGGGGGACCUCCACUUACU | 71.5% |
| 5396 | AUGGGGGACCUCCACUUAC | 71.4% |
| 5397 | AGUUCGAGUCUCUAAAAAU | 71.3% |
| 5398 | GGGGACCUCCACUUACUCC | 71.3% |
| 5399 | CAGUUCGAGUCUCUAAAAA | 71.3% |
| 5400 | GGGACCUCCACUUACUCCA | 71.3% |
| 5401 | GGGGGACCUCCACUUACUC | 71.3% |
| 5402 | AAAACAUCAUGUUGAAAGC | 71.3% |
| 5403 | AGUCUCUAAAAAUCUACAG | 71.2% |
| 5404 | AAAUCUACAGAGAUUCGCU | 71.2% |
| 5405 | UGGAGAAAAACAUCAUGUU | 71.2% |
| 5406 | AAAAUCUACAGAGAUUCGC | 71.2% |
| 5407 | GUCUCUAAAAAUCUACAGA | 71.2% |
| 5408 | AAAAACAUCAUGUUGAAAG | 71.2% |
| 5409 | GGACCAGGCAAUCAUGGAG | 71.2% |
| 5410 | CAUGGAGAAAAACAUCAUG | 71.2% |
| 5411 | UCUAAAAAUCUACAGAGAU | 71.1% |
| 5412 | ACCAGGCAAUCAUGGAGAA | 71.1% |
| 5413 | CUCUAAAAAUCUACAGAGA | 71.1% |
| 5414 | CGAGUCUCUAAAAAUCUAC | 71.1% |
| 5415 | CUGUUUGAAGUGGAACAGG | 71.1% |
| 5416 | AGAAAAACAUCAUGUUGAA | 71.1% |
| 5417 | CUAAAAAUCUACAGAGAUU | 71.1% |
| 5418 | GAGAAAAACAUCAUGUUGA | 71.1% |
| 5419 | UGAGGAAUUGUCAAGAAAC | 71.1% |
| 5420 | GAAAAACAUCAUGUUGAAA | 71.1% |
| 5421 | AUGGAGAAAAACAUCAUGU | 71.1% |
| 5422 | UGUUUGAAGUGGAACAGGA | 71.1% |
| 5423 | UUCGAGUCUCUAAAAAUCU | 71.1% |
| 5424 | UCGAGUCUCUAAAAAUCUA | 71.1% |
| 5425 | UUGAGGAAUUGUCAAGAAA | 71.1% |
| 5426 | GGAAUUGUCAAGAAACUGG | 71.1% |
| 5427 | GUUCGAGUCUCUAAAAAUC | 71.1% |
| 5428 | GACCAGGCAAUCAUGGAGA | 71.1% |
| 5429 | AGGAAUUGUCAAGAAACUG | 71.1% |
| 5430 | GAGUCUCUAAAAAUCUACA | 71.1% |
| 5431 | UCUCUAAAAAUCUACAGAG | 71.1% |
| 5432 | GGAGAAAAACAUCAUGUUG | 71.1% |
| 5433 | GAGGAAUUGUCAAGAAACU | 71.1% |
| 5434 | AAUUGUCAAGAAACUGGUU | 71.0% |
| 5435 | CAAAGACAUAAUGGAUUCC | 71.0% |
| 5436 | GAAUUGUCAAGAAACUGGU | 71.0% |
| 5437 | UGUCAAGAAACUGGUUCAU | 71.0% |
| 5438 | UGAGAAUGGGGGACCUCCA | 71.0% |
| 5439 | AUGAGAAUGGGGGACCUCC | 71.0% |
| 5440 | UGCUGUUUGAAGUGGAACA | 71.0% |
| 5441 | GUCAAGAAACUGGUUCAUG | 71.0% |
| 5442 | CUGCUGUUUGAAGUGGAAC | 71.0% |
| 5443 | UUCCAGGUAGAUUGCUUUC | 70.9% |
| 5444 | GGACCUCCACUUACUCCAA | 70.9% |
| 5445 | CCAGGUAGAUUGCUUUCUU | 70.9% |
| 5446 | AUUGAGGAAUUGUCAAGAA | 70.9% |
| 5447 | AUUGUCAAGAAACUGGUUC | 70.9% |
| 5448 | UUGUCAAGAAACUGGUUCA | 70.9% |
| 5449 | UAAAAAUCUACAGAGAUUC | 70.9% |
| 5450 | UCCAGGUAGAUUGCUUUCU | 70.9% |
| 5451 | AGUUUUGAGCAAAUAACAU | 70.8% |
| 5452 | GCUGUUUGAAGUGGAACAG | 70.8% |
| 5453 | CAGGCAAUCAUGGAGAAAA | 70.7% |
| 5454 | AAUAGUUUUGAGCAAAUAA | 70.7% |
| 5455 | UUUCCAGGUAGAUUGCUUU | 70.7% |
| 5456 | AGAAUGGGGGACCUCCACU | 70.7% |
| 5457 | AAACAUCAUGUUGAAAGCG | 70.7% |
| 5458 | GAGAAUGGGGGACCUCCAC | 70.7% |
| 5459 | GUUUUGAGCAAAUAACAUU | 70.7% |
| 5460 | AAAAAUCUACAGAGAUUCG | 70.6% |
| 5461 | UAGUAUUACUAAGGGCUUU | 70.6% |
| 5462 | AUAGUUUUGAGCAAAUAAC | 70.6% |
| 5463 | GUAUUACUAAGGGCUUUCA | 70.5% |
| 5464 | UAGUUUUGAGCAAAUAACA | 70.5% |
| 5465 | AGUAUUACUAAGGGCUUUC | 70.5% |
| 5466 | CCAGGCAAUCAUGGAGAAA | 70.4% |
| 5467 | AGGCAAUCAUGGAGAAAAA | 70.2% |
| 5468 | ACUCUCGGUCUAGACAUCA | 70.2% |
| 5469 | GAAUGGGGGACCUCCACUU | 70.2% |
| 5470 | CAAUCAUGGAGAAAAACAU | 70.1% |
| 5472 | AAUCAUGGAGAAAAACAUC | 70.1% |
| 5472 | GGCAAUCAUGGAGAAAAAC | 70.1% |
| 5473 | GCAAUCAUGGAGAAAAACA | 70.1% |
| 5474 | UUUGCAUCAGAAUGGACCA | 70.1% |
| 5475 | UUGCAUCAGAAUGGACCAG | 70.1% |
| 5476 | CUCUCGGUCUAGACAUCAA | 70.1% |
| 5477 | UCUCGGUCUAGACAUCAAA | 70.1% |
| 5478 | AAUGGGGGACCUCCACUUA | 70.1% |
| 5479 | AUCAUGGAGAAAAACAUCA | 70.1% |
| 5480 | CUUUGCAUCAGAAUGGACC | 70.0% |
| 5481 | CCGAGAUCAGAGGUCCCUA | 70.0% |
| 5482 | GUUUGAAGUGGAACAGGAG | 70.0% |
| 5483 | CGAGAUCAGAGGUCCCUAA | 70.0% |

[0176] Our research indicates that the RNAi mechanism can tolerate a small number of mismatches between the target RNA and the antisense guide sequence of the siRNA duplex. Thus, a single siRNA duplex targeting a highly conserved site in influenza will often still be active against minor variant species having only one or a few mismatches relative to the highly conserved site. We have made use of this observation to expand the list of potential influenza A viral sequence variants that are targetable by a given siRNA duplex.

[0177] In Table 3, the top nine siRNA sites identified from laboratory screening studies have been extracted from Table 20.

TABLE 3

Top nine siRNA sites as identified from labora-
tory screening studies, showing conserved and
minor variant 19-mer sequences from the Influ-
enza A as defined in Tables 20-1 through 20-6.

| | | | | |
|---|---|---|---|---|
| Seq | Ref | | | % |
| ID | ID | Segment | Match Seq | Total |

| | | | | |
|---|---|---|---|---|
| 7 | 7 | PB2 | AGACAGCGACCAAAAGAAU | 99.1% |
| 5503 | 7 | | AGACAGCGACCAAAAGgAU | 0.3% |
| 5504 | 7 | | AGACAGCGACCAAAgGAAU | 0.1% |
| 5505 | 7 | | AGACAGCGACCAAAAGAuU | 0.1% |
| 5506 | 7 | | AGACgaCGAuCAAAAGAAU | 0.1% |
| 17 | 17 | PB2 | ACUGACAGCCAGACAGCGA | 99.0% |
| 5543 | 17 | | ACUGACAGuCAGACAGCGA | 0.2% |
| 5544 | 17 | | ACUGAuAGCCAGACAGCGA | 0.3% |
| 5545 | 17 | | ACcGACAGCCAGACAGCGA | 0.2% |
| 5546 | 17 | | ACUGACAGCCAGACgaCGA | 0.1% |
| 48 | 48 | PB2 | CGGGACUCUAGCAUACUUA | 98.0% |
| 5726 | 48 | | CGGGACUCUAGCAUgCUUA | 0.1% |
| 5727 | 48 | | CGGGACUuUAGCAUACUUA | 0.2% |
| 5728 | 48 | | aGGGACUCUAGCAUACUUA | 0.1% |
| 5729 | 48 | | CGaGACUCUAGCAUACUUA | 0.4% |
| 5730 | 48 | | CGGaACUCUAGCAUACUUA | 0.6% |
| 5731 | 48 | | CGGGACUaUAGCAUACUUA | 0.1% |
| 5732 | 48 | | CGGGACUCcAGCAUACUUA | 0.3% |
| 5733 | 48 | | CGGGACUCUAaCAUACUUA | 0.1% |
| 1187 | 1187 | PB1 | GAUCUGUUCCACCAUUGAA | 90.9% |
| 6265 | 1187 | | GAUCUGUUuCACCAUUGAA | 0.7% |
| 6266 | 1187 | | aAUCUGUUCCACCAUUGAA | 0.1% |
| 6267 | 1187 | | GAcCUGUUCCACCAUUGAA | 6.9% |
| 6268 | 1187 | | GAUCUGcUCCACCAUUGAA | 0.2% |
| 6269 | 1187 | | GAUCUGUUaCACCAUUGAA | 0.1% |
| 6270 | 1187 | | GAUCUGUUCCACCAUUaAA | 0.1% |
| 6271 | 1187 | | GAcCUGUUCuACCAUUGAA | 0.1% |
| 6272 | 1187 | | GAcCUGcUCCACCAUUGAA | 0.3% |
| 1206 | 1206 | PB1 | AUGAAGAUCUGUUCCACCA | 88.6% |
| 6467 | 1206 | | AUGAAGAUCUGUUuCACCA | 0.7% |
| 6468 | 1206 | | AUGAgGAUCUGUUCCACCA | 0.2% |
| 6469 | 1206 | | AcGAAGAUCUGUUCCACCA | 0.1% |
| 6470 | 1206 | | AUGAAaAUCUGUUCCACCA | 0.1% |
| 6471 | 1206 | | AUGAAGAcCUGUUCCACCA | 6.8% |
| 6472 | 1206 | | AUGAAGAUCUGcUCCACCA | 0.2% |
| 6473 | 1206 | | AUGAAGAUCUGUUaCACCA | 0.1% |
| 6474 | 1206 | | cUGAAGAUCUGUUCCACCA | 0.1% |
| 6475 | 1206 | | uUGAAGAUCUGUUCCACCA | 2.0% |
| 6476 | 1206 | | AUGAAGAcCUGUUCuACCA | 0.1% |
| 6477 | 1206 | | AUaAAGAcCUGUUCCACCA | 0.1% |
| 6478 | 1206 | | AUGAAGAcCUGcUCCACCA | 0.2% |
| 2393 | 2393 | PA | UUGAGGAGUGCCUGAUUAA | 98.7% |
| 6888 | 2393 | | UUGAGGAGUGCCUGgUUAA | 0.1% |
| 6889 | 2393 | | UUGAGGAaUGCCUGAUUAA | 1.0% |
| 6890 | 2393 | | UUGAGGAGUGCCUaAUUAA | 0.2% |
| 2394 | 2394 | PA | GCAAUUGAGGAGUGCCUGA | 98.6% |
| 6891 | 2394 | | GCAAUUGAGGAGUGCCUGg | 0.1% |
| 6892 | 2394 | | GCAgUUGAGGAGUGCCUGA | 0.1% |
| 6893 | 2394 | | GCAAUUGAGGAaUGCCUGA | 1.0% |
| 6894 | 2394 | | GCAAUUGAGGAGUGCCUaA | 0.2% |
| 3560 | 3560 | NP | GAUCUUAUUUCUUCGGAGA | 96.0% |
| 8041 | 3560 | | GAUCUUAUUUCUUCGGgGA | 1.7% |
| 8042 | 3560 | | GAUCUUAUUUCUUuGGAGA | 0.2% |
| 8043 | 3560 | | GgUCUUAUUUCUUCGGAGA | 0.9% |
| 8044 | 3560 | | GuUCUUAUUUCUUCGGAGA | 1.1% |
| 3561 | 3561 | NP | GGAUCUUAUUUCUUCGGAG | 96.0% |
| 8045 | 3561 | | GGAUCUUAUUUCUUCGGgG | 1.7% |
| 8046 | 3561 | | GGAUCUUAUUUCUUuGGAG | 0.2% |
| 8047 | 3561 | | GGgUCUUAUUUCUUCGGAG | 0.9% |
| 8048 | 3561 | | GGuUCUUAUUUCUUCGGAG | 1.1% |

[0178] Madin-Darby canine kidney cells (MDCK) were used. For electroporation, the cells were kept in serum-free RPMI 1640 medium. Virus infections were done in infection medium. Influenza viruses A/PR/8/34 (PR8) and A/WSN/33 (WSN), subtypes H1N1 were used. Sense and antisense sequences that were tested are listed in Table 4.

TABLE 4

siRNA Sequences

| | |
|---|---|
| Name | siRNA sequence (5′-3′) |

| | | |
|---|---|---|
| PB2-2210/2230 (sense) | ggagacgugguguugguaadTdT | (SEQ ID NO: 10710) |
| PB2-2210/2230 (antisense) | uuaccaacaccacgucuccdTdT | (SEQ ID NO: 10711) |
| PB2-2240/2260 (sense) | cgggacucuagcauacuuadTdT | (SEQ ID NO: 10712) |
| PB2-2240/2260 (antisense) | uaaguaugcuagagucccgdTdT | (SEQ ID NO: 10713) |
| PB1-6/26 (sense) | gcaggcaanccauuugaaudTdT | (SEQ ID NO: 10714) |
| PB1-6/26 (antisense) | auucaaaugguuugccugcdTdT | (SEQ ID NO: 10715) |
| PB1-129/149 (sense) | caggauacaccauggahacdTdT | (SEQ ID NO: 10716) |
| PB1-129/149 (antisense) | guauccaugguguauccugdTdT | (SEQ ID NO: 10717) |
| PB1-2257/2277 (sense) | gaucuguuccaccauugaadTdT | (SEQ ID NO: 10718) |
| PB1-2257/2277 (antisense) | uucaaugguggaacagaucdTdT | (SEQ ID NO: 10719) |
| PA-44/64 (sense) | ugcuucaauccgaugauugdTdT | (SEQ ID NO: 10720) |
| PA-44/64 (antisense) | caaucaucggauugaagcadTdT | (SEQ ID NO: 10721) |
| PA-739/759 (sense) | cggcuacauugagggcaagdTdT | (SEQ ID NO: 10722) |
| PA-739/759 (antisense) | cuugcccucaauguagccgdTdT | (SEQ ID NO: 10723) |
| PA-2087/2107 (G) (sense) | gcaauugaggagugccugadTdT | (SEQ ID NO: 10724) |
| PA-2057/2107 (G) (antisense) | ucaggcacuccucaauugcdTdT | (SEQ ID NO: 10725) |
| PA-2110/2130 (sense) | ugaucccuggguuuugcuudTdT | (SEQ ID NO: 10726) |
| PA-2110/2130 (antisense) | aagcaaaacccagggaucadTdT | (SEQ ID NO: 10727) |
| PA-2131/2151 (sense) | ugcuucuugguucaacuccdTdT | (SEQ ID NO: 10728) |
| PA-2131/2151 (antisense) | ggaguugaaccaagaagcadTdT | (SEQ 1D NO: 10729) |
| NP-231/251 (sense) | uagagagaauggugcucucdTdT | (SEQ ID NO: 10730) |
| NP-231/251 (antisense) | gagagcaccauucucucuadTdT | (SEQ ID NO: 10731) |
| NP-390/410 (sense) | uaaggcgaaucuggcgccadTdT | (SEQ ID NO: 10732) |
| NP-390/410 (antisense) | uggcgccagauucgccuuadTdT | (SEQ ID NO: 10733) |
| NP-1496/1516 (sense) | ggaucuuauuucuucggagdTdT | (SEQ ID NO: 10734) |
| NP-1496/1516 (antisense) | cuccgaagaaauaagauccdTdT | (SEQ ID NO: 10735) |
| NP-1496/1516a (sense) | ggaucuuauuucuucggagadTdT | (SEQ ID NO: 10736) |
| NP-1496/1516a (antisense) | ucuccgaagaaauaagauccdTdT | (SEQ ID NO: 10737) |
| M-37/57 (sense) | ccgaggucgaaacguacgudTdT | (SEQ ID NO: 10738) |
| M-37/57 (antisense) | acguacguuucgaccucggdTdT | (SEQ ID NO: 10739) |
| M-480/500 (sense) | cagauugcugacucccagcdTdT | (SEQ ID NO: 10740) |
| M-480/500 (antisense) | gcugggagucagcaaucugdTdT | (SEQ ID NO: 10741) |
| M-598/618 (sense) | uggcuggaucgagugagcadTdT | (SEQ ID NO: 10742) |
| M-598/618 (antisense) | ugcucacucgauccagccadTdT | (SEQ ID NO: 10743) |
| M-934/954 (sense) | gaauaucgaaaggaacagcdTdT | (SEQ ID NO: 10744) |
| M-934/954 (antisense) | gcuguuccuuucgauauucdTdT | (SEQ ID NO: 10745) |
| NS-128/148 (sense) | cggcuucgccgagaucagadAdT | (SEQ ID NO: 10746) |
| NS-125/148 (antisense) | ucugaucucggcgaagccgdAdT | (SEQ ID NO: 10747) |
| NS-562/582 (R) (sense) | guccuccgaugaggacuccdTdT | (SEQ ID NO: 10748) |
| NS-562/582 (R) (antisense) | ggaguccucaucggaggacdTdT | (SEQ ID NO: 10749) |
| NS-589/609 (sense) | ugauaacacaguucgagucdTdT | (SEQ ID NO: 10750) |
| NS-589/609 (antisense) | gacucgaacuguguuaucadTdT | (SEQ ID NO: 10751) |

[0179] All siRNAs were synthesized by Dharmacon Research (Lafayette, Colo.) using 2′ ACE protection chemistry and transfected into the cells by electroporation. Six to eight h following electroporation, the serum-containing medium was washed away and PR8 or WSN virus at the appropriate multiplicity of infection was inoculated into the wells. Cells were infected with either 1,000 PFU (one virus per 1,000 cells; MOI=0.001) or 10,000 PFU (one virus per 100 cells; MOI=0.01) of virus. After 1 h incubation at room temperature, 2 ml of infection medium with 4 μg/ml of trypsin was added to each well and the cells were incubated and, at indicated times, supernatants were harvested from infected cultures and the titer of virus was determined by hemagglutination of chicken erythrocytes.

[0180] Supernatants were harvested at 24, 36, 48, and 60 hours after infection. Viral titer was measured using a standard hemagglutinin assay as described in Knipe D M, Howley, P M, Fundamental Virology, 4th edition, p. 34-35. The hemagglutination assay was done in V-bottomed 96-well plates. Serial 2-fold dilutions of each sample were incubated for 1 h on ice with an equal volume of a 0.5% suspension of chicken erythrocytes (Charles River Laboratories). Wells containing an adherent, homogeneous layer of erythrocytes were scored as positive. For plaque assays, serial 10-fold dilutions of each sample were titered for virus as described in Fundamental Virology, 4th edition, p. 32, as well known in the art.

[0181] To investigate the feasibility of using siRNA to suppress influenza virus replication, various influenza virus A RNAs were targeted. Specifically, the MDCK cell line, which is readily infected and widely used to study influenza virus, was utilized.

[0182] Each siRNA was individually introduced into populations of MDCK cells by electroporation. siRNA targeted to GFP (sense: 5′-GGCUACGUCCAGGAGCGCAUU-3′ (SEQ ID NO: 10752); antisense: 5′-UGCGCUCCUGGACGUAGCCUU-3′ (SEQ ID NO: 10753)) was used as control. This siRNA is referred to as GFP-949. In subsequent experiments (described in examples below) the UU overhang at the 3′ end of both strands was replaced by dTdT with no effect on results. A mock electroporation was also performed as a control. Eight hours after electroporation cells were infected with either influenza A virus PR8 or WSN at an MOI of either 0.1 or 0.01 and were analyzed for virus production at various time points (24, 36, 48, 60 hours) thereafter using a standard hemagglutination assay. GFP expression was assayed by flow cytometry using standard methods.

[0183] FIGS. 11A and 11B compare results of experiments in which the ability of individual siRNAs to inhibit replication of influenza virus A strain A/Puerto Rico/8/34 (H1N1) (FIG. 11A) or influenza virus A strain A/WSN/33 (H1N1) (FIG. 11B) was determined by measuring HA titer. Thus a high HA titer indicates a lack of inhibition while a low HA titer indicates effective inhibition. MDCK cells were infected at an MOI of 0.01. For these experiments one siRNA that targets the PB1 segment (PB1-2257/2277), one siRNA that targets the PB2 segment (PB2-2240/2260), one siRNA that targets the PA segment (PA-2087/2107 (G)), and three different siRNAs that target the NP genome and transcript (NP-231/251, NP-390/410, and NP-1496/1516) were tested. Note that the legends on FIGS. 11A and 11B list only the 5′ nucleotide of the siRNAs.

[0184] Symbols in FIGS. 11A and 11B are as follows: Filled squares represents control cells that did not receive siRNA. Open squares represents cells that received the GFP control siRNA. Filled circles represent cells that received siRNA PB1-2257/2277. Open circles represent cells that received siRNA PB2-2240/2260. Open triangles represent cells that received siRNA PA-2087/2107 (G). The X symbol represents cells that received siRNA NP-231/251. The + symbol represents cells that received siRNA NP-390/410. Closed triangles represent cells that received siRNA NP-1496/1516. Note that in the graphs certain symbols are sometimes superimposed. For example, in FIG. 11B the open and closed triangles are superimposed.

[0185] In the absence of siRNA (mock TF) or the presence of control (GFP) siRNA, the titer of virus increased over time, reaching a peak at approximately 48-60 hours after infection. In contrast, at 60 hours the viral titer was significantly lower in the presence of any of the siRNAs. For example, in strain WSN the HA titer (which reflects the level of virus) was approximately half as great in the presence of siRNAs PB2-2240 or NP-231 than in the controls. In particular, the level of virus was below the detection limit (10,000 PFU/ml) in the presence of siRNA NP-1496 in both strains. This represents a decrease by a factor of more than 60-fold in the PR8 strain and more than 120-fold in the WSN strain. The level of virus was also below the detection limit (10,000 PFU/ml) in the presence of siRNA PA-2087(G) in strain WSN and was extremely low in strain PR8. Suppression of virus production by siRNA was evident even from the earliest time point measured. Effective suppression, including suppression of virus production to undetectable levels (as determined by HA titer) has been observed at time points as great as 72 hours post-infection.

[0186] Table 5 summarizes results of siRNA inhibition assays at 60 hours in MDCK cells expressed in terms of fold inhibition. Thus a low value indicates lack of inhibition while a high value indicates effective inhibition. The location of siRNAs within a viral gene is indicated by the number that follows the name of the gene. As elsewhere herein, the number represents the starting nucleotide of the siRNA in the gene. For example, NP-1496 indicates an siRNA specific for NP, the first nucleotide starting at nucleotide 1496 of the NP sequence. Values shown (fold-inhibition) are calculated by dividing hemagglutinin units from mock transfection by hemagglutinin units from transfection with the indicated siRNA; a value of 1 means no inhibition.

[0187] A total of twenty siRNAs, targeted to 6 segments of the influenza virus genome (PB2, PB1, PA, NP, M and NS), were tested in the MDCK cell line system (Table 5). About 15% of the siRNA (PB1-2257, PA-2087G and NP-1496) tested displayed a strong effect, inhibiting viral production by more than 100 fold in most cases at MOI=0.001 and by 16 to 64 fold at MOI=0.01, regardless of whether PR8 or WSN virus was used. In particular, when siRNA NP-1496 or PA-2087 was used, inhibition was so pronounced that culture supernatants lacked detectable hemagglutinin activity. These potent siRNAs target 3 different viral gene segments: PB1 and PA, which are involved in the RNA transcriptase complex, and NP which is a single-stranded RNA binding nucleoprotein. Consistent with findings in other systems, the sequences targeted by these siRNAs are all positioned relatively close to the 3-prime end of the coding region (FIG. 12).

[0188] Approximately 40% of the siRNAs significantly inhibited virus production, but the extent of inhibition varied depending on certain parameters. Approximately 15% of siRNAs potently inhibited virus production regardless of whether PR8 or WSN virus was used. However, in the case of certain siRNAs, the extent of inhibition varied somewhat depending on whether PR8 or WSN was used. Some siRNAs significantly inhibited virus production only at early time points (24 to 36 hours after infection) or only at lower dosage of infection (MOI=0.001), such as PB2-2240, PB1-129, NP-231 and M-37. These siRNAs target different viral gene segments, and the corresponding sequences are positioned either close to 3-prime end or 5-prime end of the coding region (FIG. 12). Tables 5A and 5B present results of the assays. Approximately 45% of the siRNAs had no discernible effect on the virus titer, indicating that they were not effective in interfering with influenza virus production in MDCK cells. In particular, none of the four siRNAs which target the NS gene segment showed any inhibitory effect.

[0189] To estimate virus titers more precisely, plaque assays with culture supernatants were performed (at 60 hrs) from culture supernatants obtained from virus-infected cells that had undergone mock transfection or transfection with NP-1496. Approximately 6×10⁵ pfu/ml was detected in mock supernatant, whereas no plaques were detected in undiluted NP-1496 supernatant (FIG. 11C). As the detection limit of the plaque assay is about 20 pfu (plaque forming unit)/ml, the inhibition of virus production by NP-1496 is at least about 30,000 fold. Even at an MOI of 0.1, NP-1496 inhibited virus production about 200-fold.

[0190] To determine the potency of siRNA, a graded amount of NP-1496 was transfected into MDCK cells followed by infection with PR8 virus. Virus titers in the culture supernatants were measured by hemagglutinin assay. As the amount of siRNA decreased, virus titer increased in the culture supernatants as shown in FIG. 11D. However, even when as little as 25 pmol of siRNA was used for transfection, approximately 4-fold inhibition of virus production was detected as compared to mock transfection, indicating the potency of NP-1496 siRNA in inhibiting influenza virus production.

[0191] For therapy, it is desirable for siRNA to be able to effectively inhibit an existing virus infection. In a typical influenza virus infection, new virions are released beginning at about 4 hours after infection. To determine whether siRNA could reduce or eliminate infection by newly released virus in the face of an existing infection, MDCK cells were infected with PR8 virus and then transfected with NP-1496 siRNA. Virus titer increased steadily over time following mock transfection, whereas virus titer increased only slightly in NP-1496 transfected cells. Thus administration of siRNA after virus infection is effective.

[0192] Together, these results show that (i) certain siRNAs can potently inhibit influenza virus production; (ii) influenza virus production can be inhibited by siRNAs specific for different viral genes, including those encoding NP, PA, and PB1 proteins; and (iii) siRNA inhibition occurs in cells that were infected previously in addition to cells infected simultaneously with or following administration of siRNAs.

### Example 2

### siRNAs that Target Viral RNA Polymerase or Nucleoprotein Inhibit Influenza A Virus Production in Chicken Embryos

### Materials and Methods

[0193] SiRNA-oligofectamine complex formation and chicken embryo inoculation. SiRNAs were prepared as described above. Chicken eggs were maintained under standard conditions. 30 μl of Oligofectamine (product number: 12252011 from Life Technologies, now Invitrogen) was mixed with 30 μl of Opti-MEM I (Gibco) and incubated at RT for 5 min. 2.5 nmol (10 μl) of siRNA was mixed with 30 μl of Opti-MEM I and added into diluted oligofectamine. The siRNA and oligofectamine was incubated at RT for 30 min. 10-day old chicken eggs were inoculated with siRNA-oligofectamine complex together with 100 μl of PR8 virus (5000 pfu/ml). The eggs were incubated at 37° C. for indicated time and allantoic fluid was harvested. Viral titer in allantoic fluid was tested by HA assay as described above.

### Results

[0194] To confirm the results in MDCK cells, the ability of siRNA to inhibit influenza virus production in fertilized chicken eggs was also assayed. Because electroporation cannot be used on eggs, Oligofectamine, a lipid-based agent that has been shown to facilitate intracellular uptake of DNA oligonucleotides as well as siRNAs in vitro was used (25). Briefly, PR8 virus alone (500 pfu) or virus plus siRNA-oligofectamine complex was injected into the allantoic cavity of 10-day old chicken eggs as shown schematically in FIG. 13A. Allantoic fluids were collected 17 hours later for measuring virus titers by hemagglutinin assay. As shown in FIG. 13B, when virus was injected alone (in the presence of Oligofectamine), high virus titers were readily detected. Co-injection of GFP-949 did not significantly affect the virus titer. (No significant reduction in virus titer was observed when Oligofectamine was omitted.)

[0195] The injection of siRNAs specific for influenza virus showed results consistent with those observed in MDCK cells: The same siRNAs (NP-1496, PA2087 and PB1-2257) that inhibited influenza virus production in MDCK cells also inhibited virus production in chicken eggs, whereas the siRNAs (NP-231, M-37 and PB1-129) that were less effective in MDCK cells were ineffective in fertilized chicken eggs. Thus, siRNAs are also effective in interfering with influenza virus production in fertilized chicken eggs.

### Example 3

### SiRNA Inhibits Influenza Virus Production at the mRNA Level

### Materials and Methods

[0196] SiRNA preparation was performed as described above.

[0197] RNA extraction, reverse transcription and real time PCR. 1×10⁷ MDCK cells were electroporated with 2.5 nmol of NP-1496 or mock electroporated (no siRNA). Eight hours later, influenza A PR8 virus was inoculated into the cells at MOI=0.1. At times 1, 2, and 3-hour post-infection, the supernatant was removed, and the cells were lysed with Trizol reagent (Gibco). RNA was purified according to the manufacturer's instructions. Reverse transcription (RT) was carried out at 37° C. for 1 hr, using 200 ng of total RNA, specific primers (see below), and Omniscript Reverse transcriptase kit (Qiagen) in a 20-μl reaction mixture according to the manufacturer's instructions. Primers specific for either mRNA, NP vRNA, NP cRNA, NS vRNA, or NS cRNA were as follows:

(SEQ ID NO: 10754)

mRNA, dT₁₈ =
5′-TTTTTTTTTTTTTTTTTT-3′

(SEQ ID NO: 10755)

NP vRNA, NP-367:
5′-CTCGTCGCTTATGACAAAGAAG-3′.

(SEQ ID NO: 10756)

NP cRNA, NP-1565R:
5′-ATATCGTCTCGTATTAGTAGAAACAAGGGTATTTTT-3′.

(SEQ ID NO: 10757)

NS vRNA, NS-527:
5′-CAGGACATACTGATGAGGATG-3′.

(SEQ ID NO: 10758)

NS cRNA, NS-890R:
5′-ATATCGTCTCGTATTAGTAGAAACAAGGGTGTTTT-3′.

[0198] 1 μl of RT reaction mixture (i.e., the sample obtained by performing reverse transcription) and sequence-specific primers were used for real-time PCR using SYBR Green PCR master mix (AB Applied Biosystems) including SYBR Green I double-stranded DNA binding dye. PCRs were cycled in an ABI PRISM 7000 sequence detection system (AB applied Biosystem) and analyzed with ABI PRISM 7000 SDS software (AB Applied Biosystems). The PCR reaction was carried out at 50° C., 2 min, 95° C., 10 min, then 95° C., 15 sec and 60° C., 1 min for 50 cycles. Cycle times were analyzed at a reading of 0.2 fluorescence units. All reactions were done in duplicate. Cycle times that varied by more than 1.0 between the duplicates were discarded. The duplicate cycle times were then averaged and the cycle time of β-actin was subtracted from them for a normalized value.

[0199] PCR primers were as follows.

| | |
|---|---|
| For NP RNAs: | |
| NP-367: | |
| 5′-CTCGTCGCTTATGACAAAGAAG-3′. | (SEQ ID NO: 10755) |
| NP-460R: | |
| 5′-AGATCATCATGTGAGTCAGAC-3′. | (SEQ ID NO: 10759) |
| For NS RNAs: | |
| NS-527: | |
| 5′-CAGGACATACTGATGAGGATG-3′. | (SEQ ID NO: 10757) |
| NS-617R: | |
| 5′-GTTTCAGAGACTCGAACTGTG-3′. | (SEQ ID NO: 10760) |

### Results

[0200] As described above, during replication of influenza virus, vRNA is transcribed to produce cRNA, which serves as a template for more vRNA synthesis, and mRNA, which serves as a template for protein synthesis (1). Although RNAi is known to target the degradation of mRNA in a sequence-specific manner (16-18), there is a possibility that vRNA and cRNA are also targets for siRNA since vRNA of influenza A virus is sensitive to nuclease (1). To investigate the effect of siRNA on the degradation of various RNA species, reverse transcription using sequence-specific primers followed by real time PCR was used to quantify the levels of vRNA, cRNA and mRNA. FIG. 15 shows the relationship between influenza virus vRNA, mRNA, and cRNA. As shown in FIG. 15, cRNA is the exact complement of vRNA, but mRNA contains a polyA sequence at the 3′ end, beginning at a site complementary to a site 15-22 nucleotides downstream from the 5′ end of the vRNA segment. Thus compared to vRNA and cRNA, mRNA lacks 15 to 22 nucleotides at the 3′ end. To distinguish among the three viral RNA species, primers specific for vRNA, cRNA and mRNA were used in the first reverse transcription reaction. For mRNA, poly dT18 was used as primer. For cRNA, a primer complementary to the 3′ end of the RNA that is missing from mRNA was used. For vRNA, the primer can be almost anywhere along the RNA as long as it is complementary to vRNA and not too close to the 5′ end. The resulting cDNA transcribed from only one of the RNAs was amplified by real time PCR.

[0201] Following influenza virus infection, new virions are starting to be packaged and released by about 4 hrs. To determine the effect of siRNA on the first wave of mRNA and cRNA transcription, RNA was isolated early after infection. Briefly, NP-1496 was electroporated into MDCK cells. A mock electroporation (no siRNA) was also performed). Six to eight hours later, cells were infected with PR8 virus at MOI=0.1. The cells were then lysed at 1, 2 and 3 hours post-infection and RNA was isolated. The levels of mRNA, vRNA and cRNA were assayed by reverse transcription using primers for each RNA species, followed by real time PCR.

[0202] FIG. 16 shows amounts of viral NP and NS RNA species at various times following infection with virus, in cells that were mock transfected or transfected with siRNA NP-1496 approximately 6-8 hours prior to infection. As shown in FIG. 16, 1 hour after infection, there was no significant difference in the amount of NP mRNA between samples with or without NP siRNA transfection. As early as 2 hours post-infection, NP mRNA increased by 38 fold in the mock transfection group, whereas the levels of NP mRNA did not increase (or even slightly decreased) in cells transfected with siRNA. Three hours post-infection, mRNA transcript levels continued to increase in the mock transfection whereas a continuous decrease in the amount of NP mRNA was observed in the cells that received siRNA treatment. NP vRNA and cRNA displayed a similar pattern except that the increase in the amount of vRNA and cRNA in the mock transfection was significant only at 3 hrs post-infection. While not wishing to be bound by any theory, this is probably due to the life cycle of the influenza virus, in which an initial round of mRNA transcription occurs before cRNA and further vRNA synthesis.

[0203] These results indicate that, consistent with the results of measuring intact, live virus by hemagglutinin assay or plaque assay, the amounts of all NP RNA species were also significantly reduced by the treatment with NP siRNA. Although it is known that siRNA mainly mediates degradation of mRNA, the data from this experiment does not exclude the possibility of siRNA-mediated degradation of NP cRNA and vRNA although the results described below suggest that reduction in NP protein levels as a result of reduction in NP mRNA results in decreased stability of NP cRNA and/or vRNA.

### Example 4

### Identification of the Target of RNA Interference

### Materials and Methods

[0204] SiRNA preparation of unmodified siRNAs was performed as described above. Modified RNA oligonucleotides, in which the 2′-hydroxyl group was substituted with a 2′-O-methyl group at every nucleotide residue of either the sense or antisense strand, or both, were also synthesized by Dharmacon. Modified oligonucleotides were deprotected and annealed to the complementary strand. as described for unmodified oligonucleotides. siRNA duplexes were analyzed for completion of duplex formation by gel electrophoresis.

[0205] Cell culture, transfection with siRNAs, and infection with virus. These were performed essentially as described above. Briefly, for the experiment involving modified NP-1496 siRNA, MDCK cells were first transfected with NP-1496 siRNAs (2.5 nmol) formed from wild type (wt) and modified (m) strands and infected 8 hours later with PR8 virus at a MOI of 0.1. Virus titers in the culture supernatants were assayed 24 hours after infection. For the experiment involving M-37 siRNA, MDCK cells were transfected with M-37 siRNAs (2.5 nmol), infected with PR8 virus at an MOI of 0.01, and harvested for RNA isolation 1, 2, and 3 hours after infection. See Table 2 for M-37 sense and antisense sequences.

[0206] RNA extraction, reverse transcription and real time PCR were performed essentially as described above. Primers specific for either mRNA, M-specific vRNA, and M-specific cRNA, used for reverse transcription, were as follows:

(SEQ ID NO: 10754)

mRNA, dT₁₈ =
5′-TTTTTTTTTTTTTTTTTT-3′

(SEQ ID NO: 10761)

M vRNA:
5′- CGCTCAGACATGAGAACAGAATGG -3′

(SEQ ID NO: 10762)

M cRNA:
5′- ATATCGTCTCGTATTAGTAGAAACAAGGTAGTTTTT-3′.

[0207] PCR primers for M RNAs were as follows:

| | |
|---|---|
| M forward: | |
| 5′- CGCTCAGACATGAGAACAGAATGG -3′ | (SEQ ID NO: 10761) |
| M reverse: | |
| 5′- TAACTAGCCTGACTAGCAACCTC -3′ | (SEQ ID NO: 10763) |

### Results

[0208] To investigate the possibility that siRNA might interfere with vRNA and/or cRNA in addition to mRNA, NP-1496 siRNAs in which either the sense (S or +) or antisense (AS or −) strand was modified were synthesized. The modification, which substitutes a 2′-O-methyl group for the 2′-hydroxyl group in every nucleotide residue, does not affect base-pairing for duplex formation, but the modified RNA strand no longer supports RNA interference. In other words, an siRNA in which the sense strand is modified but the antisense strand is wild type (mS:wtAS) will support degradation of RNAs having a sequence complementary to the antisense strand but not a sequence complementary to the sense strand. Conversely, an siRNA in which the sense strand is wild type but the antisense strand is modified (wtS:mAS) will support degradation of RNAs having a sequence complementary to the sense strand but will not support degradation of RNAs having a sequence complementary to the sense strand.

[0209] MDCK cells were either mock transfected or transfected with NP-1496 siRNAs in which either the sense strand (mS:wtAS) or the antisense strand (wtS:mAS), was modified while the other strand was wild type. Cells were also transfected with NP-1496 siRNA in which both strands were modified (mS:mAS). Cells were then infected with PR8 virus, and virus titer in supernatants was measured. As shown in FIG. 17A, high virus titers were detected in cultures subjected to mock transfection. As expected, very low virus titers were detected in cultures transfected with wild type siRNA (wtS:wtAS), but high virus titers were detected in cultures transfected with siRNA in which both strands were modified (mS:mAS). Virus titers were high in cultures transfected with siRNA in which the antisense strand was modified (wtAS:mAS), whereas the virus titers were low in cultures transfected with siRNA in which the sense strand only was modified (mS:wtAS). While not wishing to be bound by any theory, the inventors suggest that the requirement for a wild type antisense (−) strand of siRNA duplex to inhibit influenza virus production suggests that the target of RNA interference is either mRNA (+) or cRNA (+) or both.

[0210] To further distinguish these possibilities, the effect of siRNA on the accumulation of corresponding mRNA, vRNA, and cRNA was examined. To follow transcription in a cohort of simultaneously infected cells, siRNA-transfected MDCK cells were harvested for RNA isolation 1, 2, and 3 hours after infection (before the release and re-infection of new virions). The viral mRNA, vRNA, and cRNA were first independently converted to cDNA by reverse transcription using specific primers. Then, the level of each cDNA was quantified by real time PCR. As shown in FIG. 17B, when M-specific siRNA M-37 was used, little M-specific mRNA was detected one or two hours after infection. Three hours after infection, M-specific mRNA was readily detected in the absence of M-37. In cells transfected with M-37, the level of M-specific mRNA was reduced by approximately 50%. In contrast, the levels of M-specific vRNA and cRNA were not inhibited by the presence of M-37. While not wishing to be bound by any theory, these results indicate that viral mRNA is probably the target of siRNA-mediated interference.

### Example 5

### Effects of Certain siRNAs on Viral RNA Accumulation

### Materials and Methods

[0211] SiRNA preparation was performed as described above. Primers were specific for either mRNA, NP vRNA, NP cRNA, NS vRNA, NS cRNA, M vRNA, or M cRNA. Primers specific for PB1 vRNA, PB1 cRNA, PB2 vRNA, PB2 cRNA, PA vRNA, or PA cRNA, used for reverse transcription, were as follows:

(SEQ ID NO: 10764)

| | |
|---|---|
| PB1 vRNA: | 5′-GTGCAGAAATCAGCCCGAATGGTTC-3′ |

(SEQ ID NO: 10765)

| | |
|---|---|
| PB1 cRNA: | 5′-ATATCGTCTCGTATTAGTAGAAACAAGGCATTT-3′ |

(SEQ ID NO: 10766)

| | |
|---|---|
| PB2 vRNA: | 5′-GCGAAAGGAGAGAAGGCTAATGTG-3′ |

(SEQ ID NO: 10767)

| | |
|---|---|
| PB2 cRNA: | 5′-ATATGGTCTCGTATTAGTAGAAACAAGGTCGTTT-3′ |

(SEQ ID NO: 10768)

| | |
|---|---|
| PA vRNA: | 5′-GCTTCTTATCGTTCAGGCTCTTAGG-3′ |

(SEQ ID NO: 10769)

| | |
|---|---|
| PA cRNA: | 5′-ATATCGTCTCGTATTAGTAGAAACAAGGTACTT-3′ |

[0212] PCR primers for PB1, PB2, and PA RNAs were as follows:

(SEQ ID NO: 10770)

| | |
|---|---|
| PB1 forward: | 5′-CGGATTGATGCACGGATTGATTTC-3′ |

(SEQ ID NO: 10771)

| | |
|---|---|
| PB1 reverse: | 5′-GACGTCTGAGCTCTTCAATGGTGGAAC-3′ |

(SEQ ID NO: 10766)

| | |
|---|---|
| PB2 forward: | 5′-GCGAAAGGAGAGAAGGCTAATGTG-3′ |

(SEQ ID NO: 10772)

| | |
|---|---|
| PB2 reverse: | 5′-AATCGCTGTCTGGCTGTCAGTAAG-3′ |

(SEQ ID NO: 10768)

| | |
|---|---|
| PA forward: | 5′-GCTTCTTATCGTTCAGGCTCTTAGG-3′ |

(SEQ ID NO: 10773)

| | |
|---|---|
| PA reverse: | 5′-CCGAGAAGCATTAAGCAAAACCCAG-3′ |

### Results

[0213] To determine whether NP-1496 targets the degradation of the NP gene segment specifically or whether the levels of viral RNAs other than NP are also affected, primers specific for NS were used for RT and real time PCR to measure the amount of different NS RNA species (mRNA, vRNA, cRNA) as described above. As shown in FIG. 18, the changes in NS mRNA, vRNA and cRNA showed the same pattern as that observed for NP RNAs. At 3 hours post-infection, a significant increase in all NS RNA species could be seen in mock transfected cells, whereas no significant changes in NS RNA levels were seen in the cells that received NP-1496 siRNA. This result indicates that the transcription and replication of different viral RNAs are coordinately regulated, at least with respect to NP RNAs. By coordinately regulated is meant that levels of one transcript affect levels of another transcript, either directly or indirectly. No particular mechanism is implied. When NP transcripts are degraded by siRNA treatment the levels of other viral RNAs are also reduced.

[0214] To further explore the effect of NP siRNAs on other viral RNAs, accumulation of mRNA, vRNA, and cRNA of all viral genes was measured in cells that had been treated with NP-1496. As shown in FIG. 18A (top panel), NP-specific mRNA was low one or two hours after infection. Three hours after infection, NP mRNA was readily detected in the absence of NP-1496, whereas in the presence of NP-1496, the level of NP mRNA remained at the background level, indicating that siRNA inhibited the accumulation of specific mRNA. As shown in FIG. 18A (middle and bottom panels) levels of NP-specific and NS-specific vRNA and cRNA were greatly inhibited by the presence of NP-1496. These results confirm the results described above. In addition, in the NP-1496-treated cells, the accumulation of mRNA, vRNA, and cRNA of the M, NS, PB1, PB2, and PA genes was also inhibited (FIGS. 18B, 18C, and 18H). Furthermore, the broad inhibitory effect was also observed for PA-2087. The top, middle, and bottom panels on the left side in FIGS. 18E, 18F, and 18G display the same results as presented in FIGS. 18A, 18B, and 18C, showing the inhibition of viral mRNA transcription and of viral vRNA and cRNA replication by NP-1496 siRNA. The top, middle, and bottom panels on the right side in FIGS. 18E, 18F, and 18G present results of the same experiment performed with PA-2087 siRNA at the same concentration. As shown in FIG. 18E, right upper, middle, and lower panels respectively, at three hours after infection PA, M, and NS mRNA were readily detected in the absence of PA-2087, whereas the presence of PA-2087 inhibited transcription of PA, M, and NS mRNA. As shown in FIG. 18F, right upper, middle, and lower panels respectively, at three hours after infection PA, M, and NS vRNA were readily detected in the absence of PA-2087, whereas the presence of PA-2087 inhibited accumulation of PA, M, and NS vRNA. As shown in FIG. 18G, right upper, middle, and lower panels respectively, at three hours after infection PA, M, and NS cRNA were readily detected in the absence of PA-2087, whereas the presence of PA-2087 inhibited accumulation of PA, M, and NS cRNA. In addition, FIG. 18H shows that NP-specific siRNA inhibits the accumulation of PB1-(top panel), PB2-(middle panel) and PA-(lower panel) specific mRNA.

[0215] While not wishing to be bound by any theory, the inventors suggest that the broad effect of NP siRNA is probably a result of the importance of NP in binding and stabilizing vRNA and cRNA, and not because NP-specific siRNA targets RNA degradation non-specifically. The NP gene segment in influenza virus encodes a single-stranded RNA-binding nucleoprotein, which can bind to both vRNA and cRNA (see FIG. 14). During the viral life cycle, NP mRNA is first transcribed and translated. The primary function of the NP protein is to encapsidate the virus genome for the purpose of RNA transcription, replication and packaging. In the absence of NP protein, the full-length synthesis of both vRNA and cRNA is strongly impaired. When NP siRNA induces the degradation of NP RNA, NP protein synthesis is impaired and the resulting lack of sufficient NP protein subsequently affects the replication of other viral gene segments. In this way, NP siRNA could potently inhibit virus production at a very early stage.

[0216] The number of NP protein molecules in infected cells has been hypothesized to regulate the levels of mRNA synthesis versus genome RNA (vRNA and cRNA) replication (1). Using a temperature-sensitive mutation in the NP protein, previous studies have shown that cRNA, but not mRNA, synthesis was temperature sensitive both in vitro and in vivo (70, 71). NP protein was shown to be required for elongation and antitermination of the nascent cRNA and vRNA transcripts (71, 72). The results presented above show that NP-specific siRNA inhibited the accumulation of all viral RNAs in infected cells. While not wishing to be bound by any theory, it appears probable that in the presence of NP-specific siRNA, the newly transcribed NP mRNA is degraded, resulting in the inhibition of NP protein synthesis following virus infection. Without newly synthesized NP, further viral transcription and replication, and therefore new virion production is inhibited.

[0217] Similarly, in the presence of PA-specific, the newly transcribed PA mRNA is degraded, resulting in the inhibition of PA protein synthesis. Despite the presence of 30-60 copies of RNA transcriptase per influenza virion (1), without newly synthesized RNA transcriptase, further viral transcription and replication are likely inhibited. Similar results were obtained using siRNA specific for PB1. In contrast, the matrix (M) protein is not required until the late phase of virus infection (1). Thus, M-specific siRNA inhibits the accumulation of M-specific mRNA but not vRNA, cRNA, or other viral RNAs. Taken together, these findings demonstrate a critical requirement for newly synthesized nucleoprotein and polymerase proteins in influenza viral RNA transcription and replication. Both mRNA- and virus-specific mechanisms by which NP-, PA-, and PB1-specific siRNAs interfere with mRNA accumulation and other viral RNA transcription suggest that these siRNAs may be especially potent inhibitors of influenza virus infection.

### Example 6

### Broad Inhibition of Influenza Virus RNA Accumulation by Certain siRNAs is Not Due to the Interferon Response or to Virus-Induced RNA Degradation

[0218] RNA levels were measured using PCR under standard conditions. The following PCR primers were used for measurement of γ-actin RNA.

| | |
|---|---|
| γ-actin forward: | (SEQ ID NO: 10774) |
| 5′-TCTGTCAGGGTTGGAAAGTC-3′ | |
| γ-actin reverse: | |
| 5′-AAATGCAAACCGCTTCCAAC-3′ | (SEQ ID NO: 10775) |

[0219] One possible cause for the broad inhibition of viral RNA accumulation described above is an interferon response of the infected cells in the presence of siRNA (23, 65, 66). Thus, the above experiments were repeated in Vero cells in which the entire IFN locus, including all α, β, and ω genes, are deleted (67, 68) (Q.G. and J.C. unpublished data). Just as in MDCK cells, the accumulation of NP-, M-, and NS-specific mRNAs were all inhibited by NP-1496 (FIG. 18D). In addition, the effect of siRNA on the levels of transcripts from cellular genes, including β-actin, γ-actin, and GAPDH, was assayed using PCR. No significant difference in the transcript levels was detected in the absence or presence of siRNA indicating that the inhibitory effect of siRNA is specific for viral RNAs. These results suggest that the broad inhibition of viral RNA accumulation by certain siRNAs is not a result of a cellular interferon response.

[0220] Following influenza virus infection, the presence of dsRNA also activates a cellular pathway that targets RNA for degradation (23). To examine the effect of siRNA on the activation of this pathway, we assayed the levels of phosphorylated protein kinase R (PKR), the most critical component of the pathway (23). Transfection of MDCK cells with NP-1496 in the absence of virus infection did not affect the levels of activated PKR (data not shown). Infection by influenza virus resulted in an increased level of phosphorylated PKR, consistent with previous studies (65, 66, 69). However, the increase was the same in the presence or absence of NP-1496 (data not shown). Thus, the broad inhibition of viral RNA accumulation is not a result of enhanced virus-induced degradation in the presence of siRNA.

### Example 7

### Inhibition of Influenza Virus Production in Mice by siRNAs

[0221] This example describes experiments showing that administration of siRNAs targeted to influenza virus NP or PA transcripts inhibit production of influenza virus in mice when administered either prior to or following infection with influenza virus. The inhibition is dose-dependent and shows additive effects when two siRNAs each targeted to a transcript expressed from a different influenza virus gene were administered together.

### Materials and Methods

[0222] SiRNA preparation. This was performed as described above.

[0223] SiRNA delivery. siRNAs (30 or 60 μg of GFP-949, NP-1496, or PA-2087) were incubated with jetPEI™ for oligonucleotides cationic polymer transfection reagent, N/P ratio=5 (Qbiogene, Inc., Carlsbad, Calif.; Cat. No. GDSP20130; N/P refers to the number of nitrogens per nucleotide phosphate in the jetPEI/siRNA mixture) or with poly-L-lysine (MW (vis) 52,000; MW (LALLS) 41,800, Sigma Cat. No. P2636) for 20 min at room temperature in 5% glucose. The mixture was injected into mice intravenously, into the retro-orbital vein, 200 μl per mouse, 4 mice per group. 200 μl 5% glucose was injected into control (no treatment) mice. The mice were anesthetized with 2.5% Avertin before siRNA injection or intranasal infection.

[0224] Viral infection. B6 mice (maintained under standard laboratory conditions) were intranasally infected with PR8 virus by dropping virus-containing buffer into the mouse's nose with a pipette, 30 ul (12,000 pfu) per mouse.

[0225] Determination of viral titer. Mice were sacrificed at various times following infection, and lungs were harvested. Lungs were homogenized, and the homogenate was frozen and thawed twice to release virus. PR8 virus present in infected lungs was titered by infection of MDCK cells. Flat-bottom 96-well plates were seeded with 3×10⁴ MDCK cells per well, and 24 hrs later the serum-containing medium was removed. 25 μl of lung homogenate, either undiluted or diluted from 1×10⁻¹ to 1×10⁻⁷, was inoculated into triplicate wells. After 1 h incubation, 175 μl of infection medium with 4 μg/ml of trypsin was added to each well. Following a 48 h incubation at 37° C., the presence or absence of virus was determined by hemagglutination of chicken RBC by supernatant from infected cells. The hemagglutination assay was carried out in V-bottom 96-well plates. Serial 2-fold dilutions of supernatant were mixed with an equal volume of a 0.5% suspension (vol/vol) of chicken erythrocytes (Charles River Laboratories) and incubated on ice for 1 h. Wells containing an adherent, homogeneous layer of erythrocytes were scored as positive. The virus titers were determined by interpolation of the dilution end point that infected 50% of wells by the method of Reed and Muench (TCID₅₀), thus a lower TCID₅₀ reflects a lower virus titer. The data from any two groups were compared by Student t test, which was used throughout the experiments described herein to evaluate significance.

[0226] FIG. 19A shows results of an experiment demonstrating that siRNA targeted to viral NP transcripts inhibits influenza virus production in mice when administered prior to infection. 30 or 60 μg of GFP-949 or NP-1496 siRNAs were incubated with jetPEI and injected intravenously into mice as described above in Materials and Methods. Three hours later mice were intranasally infected with PR8 virus, 12000 pfu per mouse. Lungs were harvested 24 hours after infection. As shown in FIG. 19A, the average log₁₀TCID₅₀ of the lung homogenate for mice that received no siRNA treatment (NT; filled squares) or received an siRNA targeted to GFP (GFP 60 μg; open squares) was 4.2. In mice that were pretreated with 30 μg siRNA targeted to NP (NP 30 μg; open circles) and jetPEI, the average log₁₀TCID₅₀ of the lung homogenate was 3.9. In mice that were pretreated with 60 μg siRNA targeted to NP (NP 60 μg; filled circles) and jetPEI, the average log₁₀TCID₅₀ of the lung homogenate was 3.2. The difference in virus titer in the lung homogenate between the group that received no treatment and the group that received 60 μg NP siRNA was significant with P=0.0002. Data for individual mice are presented in Table 6A (NT=no treatment).

[0227] FIG. 19B shows results of another experiment demonstrating that siRNA targeted to viral NP transcripts inhibits influenza virus production in mice when administered intravenously prior to infection in a composition containing the cationic polymer PLL. 30 or 60 μg of GFP-949 or NP-1496 siRNAs were incubated with PLL and injected intravenously into mice as described above in Materials and Methods. Three hours later mice were intranasally infected with PR8 virus, 12000 pfu per mouse. Lungs were harvested 24 hours after infection. As shown in FIG. 19B, the average log₁₀TCID₅₀ of the lung homogenate for mice that received no siRNA treatment (NT; filled squares) or received an siRNA targeted to GFP (GFP 60 μg; open squares) was 4.1. In mice that were pretreated with 60 μg siRNA targeted to NP (NP 60 μg; filled circles) and PLL, the average log₁₀TCID₅₀ of the lung homogenate was 3.0. The difference in virus titer in the lung homogenate between the group that received 60 μg GFP and the group that received 60 μg NP siRNA was significant with P=0.001. Data for individual mice are presented in Table 6A (NT=no treatment). These data indicate that siRNA targeted to the influenza NP transcript reduced the virus titer in the lung when administered prior to virus infection. They also indicate that a mixtures of an siRNA with a cationic polymer effectively inhibits influenza virus in the lung when administered by intravenous injection, not requiring techniques such as hydrodynamic transfection.

TABLE 6A
Inhibition of influenza virus production in mice by siRNA with cationic
polymers

| | |
|---|---|
| Treatment | log₁₀TCID50 |

| | | | | |
|---|---|---|---|---|
| NT (jetPEI | 4.3 | 4.3 | 4.0 | 4.0 |
| experiment) | | | | |
| GFP (60 μg) + jetPEI | 4.3 | 4.3 | 4.3 | 4.0 |
| NP (30 μg) + jetPEI | 4.0 | 4.0 | 3.7 | 3.7 |
| NP (60 μg) + jetPEI | 3.3 | 3.3 | 3.0 | 3.0 |
| NT (PLL experiment) | 4.0 | 4.3 | 4.0 | 4.0 |
| GFP (60 μg) + PLL | 4.3 | 4.0 | 4.0 | (not |
| | | | | done) |
| NP (60 μg) + PLL | 3.3 | 3.0 | 3.0 | 2.7 |

[0228] FIG. 19C shows results of a third experiment demonstrating that siRNA targeted to viral NP transcripts inhibits influenza virus production in mice when administered prior to infection and demonstrates that the presence of a cationic polymer significantly increases the inhibitory efficacy of siRNA. 60 μg of GFP-949 or NP-1496 siRNAs were incubated with phosphate buffered saline (PBS) or jetPEI and injected intravenously into mice as described above in Materials and Methods. Three hours later mice were intranasally infected with PR8 virus, 12000 pfu per mouse. Lungs were harvested 24 hours after infection. As shown in FIG. 19C, the average log₁₀TCID₅₀ of the lung homogenate for mice that received no siRNA treatment (NT; open squares) was 4.1, while the average log₁₀TCID₅₀ of the lung homogenate for mice that received an siRNA targeted to GFP in PBS (GFP PBS; open triangles) was 4.4. In mice that were pretreated with 60 μg siRNA targeted to NP in PBS (NP PBS; closed triangles) the average log₁₀TCID₅₀ of the lung homogenate was 4.2, showing only a modest increase in efficacy relative to no treatment or treatment with an siRNA targeted to GFP. In mice that were pretreated with 60 μg siRNA targeted to GFP in jetPEI (GFP PEI; open circles), the average log₁₀TCID₅₀ of the lung homogenate was 4.2. However, in mice that received 60 μg siRNA targeted to NP in jetPEI (NP PEI; closed circles), the average log₁₀TCID₅₀ of the lung homogenate was 3.2. The difference in virus titer in the lung homogenate between the group that received GFP siRNA in PBS and the group that received NP siRNA in PBS was significant with P=0.04, while the difference in virus titer in the lung homogenate between the group that received GFP siRNA with jetPEI and the group that received NP siRNA with jetPEI was highly significant with P=0.003. Data for individual mice are presented in Table 6B (NT=no treatment).

TABLE 6B
Inhibition of influenza virus production in mice
by siRNA showing increased efficacy with cationic polymer

| | |
|---|---|
| Treatment | log₁₀TCID50 |

| | | | | |
|---|---|---|---|---|
| NT | 4.3 | 4.3 | 4.0 | 3.7 |
| GFP (60 μg) + PBS | 4.3 | 4.3 | 4.7 | 4.3 |
| NP (60 μg) + PBS | 3.7 | 4.3 | 4.0 | 4.0 |
| GFP (60 μg) + jetPEI | 4.3 | 4.3 | 4.0 | 3.0 |
| NT (60 μg) + jetPEI | 3.3 | 3.0 | 3.7 | 3.0 |

[0229] Additional experiments were performed to assess the ability of siRNA to inhibit influenza virus production at various times after infection, when administered at various time points prior to or following infection.

[0230] siRNA was administered as described above except that 120 ug siRNA was administered 12 hours before virus infection. Table 6C shows the results expressed as log₁₀TCID₅₀. The P value comparing NP-treated with control group was 0.049

TABLE 6C

| | Mouse 1 | Mouse 2 | Mouse 3 | Mouse 4 |
|---|---|---|---|---|
| NT | 4.3 | 4 | 4 | 4 |
| GFP-949 | 4.3 | 4 | 4 | 4 |
| NP-1496 | 4 | 3.7 | 3.7 | 3.3 |

[0231] In another experiment, siRNA (60 ug) was administered 3 hours before infection. 1500 pfu of PR8 virus was administered intranasally. The infected lung was harvested 48 h after infection. Table 6D shows the results expressed as log₁₀TCID₅₀. The P value comparing NP-treated with control group was 0.03.

TABLE 6D

| | Mouse 1 | Mouse 2 | Mouse 3 | Mouse 4 |
|---|---|---|---|---|
| NT | 4 | 4 | 4 | 4 |
| GFP-949 | 4.3 | 4 | 4 | 3.7 |
| NP-1496 | 3 | 3.7 | 3.7 | 3.3 |

[0232] In another experiment, siRNA (120 ug) was administered 24 hours after PR8 (1500 pfu) infection. 52 hours post-infection, the lung was harvested and virus titer was measured. Table 6E shows the results expressed as log₁₀TCID₅₀. The P value comparing NP-treated with control group was 0.03.

TABLE 6E

| | Mouse 1 | Mouse 2 | Mouse 3 | Mouse 4 |
|---|---|---|---|---|
| GFP-949 | 2.3 | 2.7 | 2 | 2.7 |
| NP-1496 | 2 | 2 | 1.7 | 2 |

[0233] Other polymers were also shown to be effective siRNA delivery agents. FIG. 19D is a plot showing that siRNA targeted to NP (NP-1496) inhibits influenza virus production in mice when administered intravenously together with a poly(beta amino ester) (J28). FIG. 19E is a plot showing that siRNA targeted to NP (NP-1496) inhibits influenza virus production in mice when administered intraperitoneally together with a poly(beta amino ester) (J28 or C32) while a control RNA (GFP) has no significant effect. The experiments were performed essentially as described above except that the ratio of polymer to siRNA was a weight/weight ratio (for instance, 60:1 w/w). Polymers and siRNA were mixed and administered to mice either intravenously or intraperitoneally 3 hours prior to intranasal infection with 12,000 pfu of PR8 virus. Lungs were harvested 24 hours later and HA assays were performed. The amine and bis(acrylate ester) monomers present in J28 and C32 are described and depicted in U.S. Ser. No. 10/446,444. The polymers were a kind gift of Dr. Robert Langer.

[0234] FIG. 20 shows results of an experiment demonstrating that siRNAs targeted to different influenza virus transcripts exhibit an additive effect. Sixty μg of NP-1496 siRNA, 60 μg PA-2087 siRNA, or 60 μg NP-1496 siRNA+60 μg PA-2087 siRNA were incubated with jetPEI and injected intravenously into mice as described above in Materials and Methods. Three hours later mice were intranasally infected with PR8 virus, 12000 pfu per mouse. Lungs were harvested 24 hours after infection. As shown in FIG. 20, the average log₁₀TCID₅₀ of the lung homogenate for mice that received no siRNA treatment (NT; filled squares) was 4.2. In mice that received 60 μg siRNA targeted to NP (NP 60 μg; open circles), the average log₁₀TCID₅₀ of the lung homogenate was 3.2. In mice that received 60 μg siRNA targeted to PA (PA 60 μg; open triangles), the average log₁₀TCID₅₀ of the lung homogenate was 3.4. In mice that received 60 μg siRNA targeted to NP+60 μg siRNA targeted to PA (NP+PA; filled circles), the average log₁₀TCID₅₀ of the lung homogenate was 2.4. The differences in virus titer in the lung homogenate between the group that received no treatment and the groups that received 60 μg NP siRNA, 60 μg PA siRNA, or 60 μg NP siRNA+60 μg PA siRNA were significant with P=0.003, 0.01, and 0.0001, respectively. The differences in lung homogenate between the groups that received 60 μg NP siRNA or 60 μg NP siRNA and the group that received 60 μg NP siRNA+60 μg PA siRNA were significant with P=0.01. Data for individual mice are presented in Table 7 (NT=no treatment). These data indicate that pretreatment with siRNA targeted to the influenza NP or PA transcript reduced the virus titer in the lungs of mice subsequently infected with influenza virus. The data further indicate that a combination of siRNA targeted to different viral transcripts exhibit an additive effect, suggesting that therapy with a combination of siRNAs targeted to different transcripts may allow a reduction in dose of each siRNA, relative to the amount of a single siRNA that would be needed to achieve equal efficacy.

TABLE 7
Additive effect of siRNA against influenza virus in mice

| | |
|---|---|
| Treatment | log₁₀TCID50 |

| | | | | |
|---|---|---|---|---|
| NT | 4.3 | 4.3 | 4.0 | 4.0 |
| NP (60 μg) | 3.7 | 3.3 | 3.0 | 3.0 |
| PA (60 μg) | 3.7 | 3.7 | 3.0 | 3.0 |
| NP + PA (60 μg each) | 2.7 | 2.7 | 2.3 | 2.0 |

[0235] FIG. 21 shows results of an experiment demonstrating that siRNA targeted to viral NP transcripts inhibits influenza virus production in mice when administered following infection. Mice were intranasally infected with PR8 virus, 500 pfu. Sixty μg of GFP-949 siRNA, 60 μg PA-2087 siRNA, 60 μg NP-1496 siRNA, or 60 μg NP siRNA+60 μg PA siRNA were incubated with jetPEI and injected intravenously into mice 5 hours later as described above in Materials and Methods. Lungs were harvested 28 hours after administration of siRNA. As shown in FIG. 21, the average log₁₀TCID₅₀ of the lung homogenate for mice that received no siRNA treatment (NT; filled squares) or received the GFP-specific siRNA GFP-949 (GFP; open squares) was 3.0. In mice that received 60 μg siRNA targeted to PA (PA 60 μg; open triangles), the average log₁₀TCID₅₀ of the lung homogenate was 2.2. In mice that received 60 μg siRNA targeted to NP (NP 60 μg; open circles), the average log₁₀TCID₅₀ of the lung homogenate was 2.2. In mice that received 60 μg NP siRNA+60 μg PA siRNA (PA+NP; filled circles), the average log₁₀TCID₅₀ of the lung homogenate was 1.8. The differences in virus titer in the lung homogenate between the group that received no treatment and the groups that received 60 μg PA, NP siRNA, or 60 μg NP siRNA+60 μg PA siRNA were significant with P=0.09, 0.02, and 0.003, respectively. The difference in virus titer in the lung homogenate between the group that received NP siRNA and PA+NP siRNAs had a P value of 0.2. Data for individual mice are presented in Table 8 (NT=no treatment). These data indicate that siRNA targeted to the influenza NP and/or PA transcripts reduced the virus titer in the lung when administered following virus infection.

TABLE 8
Inhibition of influenza virus production in infected mice by siRNA

| | |
|---|---|
| Treatment | log₁₀TCID50 |

| | | | | |
|---|---|---|---|---|
| NT | 3.0 | 3.0 | 3.0 | 3.0 |
| GFP (60 μg) | 3.0 | 3.0 | 3.0 | 2.7 |
| PA (60 μg) | 2.7 | 2.7 | 2.3 | 1.3 |
| NP (60 μg) | 2.7 | 2.3 | 2.3 | 1.7 |
| NP + PA (60 μg each) | 2.3 | 2.0 | 1.7 | 1.3 |

### Example 8

### Inhibition of Influenza Virus Production in Cells by Administration of a Lentivirus that Provides a Template for Production of shRNA

[0236] An oligonucleotide that serves as a template for synthesis of an NP-1496a shRNA (see FIG. 22A) was cloned between the U6 promoter and termination sequence of lentiviral vector pLL3.7 (Rubinson, D., et al, Nature Genetics, Vol. 33, pp. 401-406, 2003), as depicted schematically in FIG. 22A. The oligonucleotide was inserted between the HpaI and XhoI restriction sites within the multiple cloning site of pLL3.7. This lentiviral vector also expresses EGFP for easy monitoring of transfected/infected cells. Lentivirus was produced by co-transfecting the DNA vector comprising a template for production of NP-1496a shRNA and packaging vectors into 293T cells. Forty-eight h later, culture supernatant containing lentivirus was collected, spun at 2000 rpm for 7 min at 4° C. and then filtered through a 0.45 um filter. Vero cells were seeded at 1×10⁵ per well in 24-well plates. After overnight culture, culture supernatants containing that contained the insert (either 0.25 ml or 1.0 ml) were added to wells in the presence of 8 ug/ml polybrene. The plates were then centrifuged at 2500 rpm, room temperature for 1 h and returned to culture. Twenty-four h after infection, the resulting Vero cell lines (Vero-NP-0.25, and Vero-NP-1.0) were analyzed for GFP expression by flow cytometry along with parental (non-infected) Vero cells. It is noted that NP-1496a differs from NP-1496 due to the inadvertent inclusion of an additional nucleotide (A) at the 3′ end of the sense portion and a complementary nucleotide (U) at the 5′ end of the antisense portion, resulting in a duplex portion that is 20 nt in length rather than 19 as in NP-1496. (See Table 2). According to other embodiments of the invention NP-1496 sequences rather than NP-1496a sequences are used. In addition, the loop portion of NP-1496a shRNA differs from that of NP-1496 shRNA.

[0237] Control Vero cells and Vero cells infected with lentivirus containing the insert (Vero-NP-0.25 and Vero-NP-1.0) were infected with PR8 virus at MOI of 0.04, 0.2 and 1. Influenza virus titers in the supernatants were determined by HA assay 48 hrs after infection as described above.

[0238] Lentivirus containing templates for production of NP-1496a shRNA were tested for ability to inhibit influenza virus production in Vero cells. The NP-1496a shRNA includes two complementary regions capable of forming a stem-loop structure containing a double-stranded portion that has the same sequence as the NP-1496a siRNA described above. As shown in FIG. 22B, incubation of lentivirus-containing supernatants with Vero cells overnight resulted in expression of EGFP, indicating infection of Vero cells by lentivirus. The shaded curve represents mean fluorescence intensity in control cells (uninfected). When 1 ml of supernatant was used, almost all cells became EGFP positive and the mean fluorescence intensity was high (1818) (Vero-NP-1.0). When 0.25 ml of supernatant was used, most cells (˜95%) were EGFP positive and the mean fluorescence intensity was lower (503) (Vero-NP-0.25).

[0239] Parental Vero cells and lentivirus-infected Vero cells were then infected with influenza virus at MOI of 0.04, 0.2, and 0.1, and virus titers were assayed 48 hrs after influenza virus infection. With increasing MOI, the virus titers increased in the supernatants of parental Vero cell cultures (FIG. 22C). In contrast, the virus titers remained very low in supernatants of Vero-NP-1.0 cell cultures, indicating influenza virus production was inhibited in these cells. Similarly, influenza virus production in Vero-NP-0.25 cell cultures was also partially inhibited. The viral titers are presented in Table 9. These results suggest that NP-1496 shRNA expressed from lentivirus vectors can be processed into siRNA to inhibit influenza virus production in Vero cells. The extent of inhibition appears to be proportional to the extent of virus infection per cell (indicated by EGFP level).

TABLE 9
Inhibition of influenza virus production by siRNA expressed in
cells in tissue culture

| Cell Line | Viral Titer | | |
|---|---|---|---|
| Vero | 16 | 64 | 128 |
| Vero-NP-0.25 | 8 | 32 | 64 |
| Vero-NP-1.0 | 1 | 4 | 8 |

### Example 9

### Inhibition of Influenza Production in Mice by Intranasal Administration of a DNA Vector from which siRNA Precursors are Transcribed

[0240] Construction of a plasmid from which NP-1496a shRNA is expressed is described above. Oligonucleotides that serve as templates for synthesis of PB1-2257 shRNA or RSV-specific shRNA were cloned between the U6 promoter and termination sequence of lentiviral vector pLL3.7 as described above and depicted schematically in FIG. 22A for NP-1496a shRNA. The sequences of the oligonucleotides were as follows:

NP-1496a sense:

(SEQ ID NO: 10776)

5′-
TGGATCTTATTTCTTCGGAGATTCAAGAGATCTCCGAAGAAATAAGATCC
TTTTTTC-3′
NP-1496a antisense:

(SEQ ID NO: 10777)

5′-
TCGAGAAAAAAGGATCTTATTTCTTCGGAGATCTCTTGAATCTCCGAAGA
AATAA
GATCCA-3′
PB1-2257 sense:

(SEQ ID NO: 10778)

5′-TGATCTGTTCCACCATTGAATTCAAGAGATTCAATGGTGGAACAGAT
CTTTTTTC-3′
PB1-2257 antisense:

(SEQ ID NO: 10779)

5′-
TCGAGAAAAAAGATCTGTTCCACCATTGAATCTCTTGAATTCAATGGTGG
AACAGATCA-3′
RSV sense:

(SEQ ID NO: 10780)

5′-TGCGATAATATAACTGCAAGATTCAAGAGATCTTGCAGTTATATTAT
CGTTTTTTC-3′
RSV antisense:

(SEQ ID NO: 10781)

5′-
TCGAGAAAAAACGATAATATAACTGCAAGATCTCTTGAATCTTGCAGTTA
TATTA
TCGCA-3′

[0241] The RSV shRNA expressed from the vector comprising the above oligonucleotide is processed in vivo to generate an siRNA having sense and antisense strands with the following sequences:

| | |
|---|---|
| Sense: | |
| 5′-CGATAATATAACTGCAAGA-3′ | (SEQ ID NO: 10782) |
| Antisense: | |
| 5′-TCTTGCAGTTATATTATCG-3′ | (SEQ ID NO: 10783) |

[0242] A PA-specific hairpin may be similarly constructed using the following oligonucleotides:

PA-2087 sense:

(SEQ ID NO: 10784)

5′-
TGCAATTGAGGAGTGCCTGATTCAAGAGATCAGGCACTCCTCAATTGCTT
TTTTC-3′
PA-2087 antisense:

(SEQ ID NO: 10785)

5′-
TCGAGAAAAAAGCAATTGAGGAGTGCCTGATCTCTTGAATCAGGCAGTCC
TCAATTGCA-3′

[0243] Plasmid DNAs capable of serving as templates for expression of NP-1496a shRNA, PB1-2257 shRNA, or RSV-specific shRNA (60 μg each) were individually mixed with 40 μl Infasurf® (ONY, Inc., Amherst, N.Y.) and 20 μl of 5% glucose and were administered intranasally to groups of mice, 4 mice each group, as described above. A mixture of 40 μl Infasurf and 20 μl of 5% glucose was administered to mice in the no treatment (NT) group. The mice were intranasally infected with PR8 virus, 12000 pfu per mouse, 13 hours later, as described above. Lungs were harvested and viral titer determined 24 hours after infection.

[0244] The ability of shRNAs expressed from DNA vectors to inhibit influenza virus infection in mice was tested. For these experiments, plasmid DNA was mixed with Infasurf, a natural surfactant extract from calf lung similar to vehicles previously shown to promote gene transfer in the lung (74). The DNA/Infasurf mixtures were instilled into mice by dropping the mixture into the nose using a pipette. Mice were infected with PR8 virus, 12000 pfu per mouse, 13 hours later. Twenty-four hrs after influenza virus infection, lungs were harvested and virus titers were measured by MDCK/hemagglutinin assay.

[0245] As shown in FIG. 23, virus titers were high in mice that were not given any plasmid DNA or were given a DNA vector expressing a respiratory syncytial virus (RSV)-specific shRNA. Lower virus titers were observed when mice were given plasmid DNA that expresses either NP-1496a shRNA or PB1-2257 shRNA. The virus titers were more significantly decreased when mice were given both influenza-specific plasmid DNAs together, one expressing NP-1496a shRNA and the other expressing PB1-2257 shRNA. The average log₁₀TCID₅₀ of the lung homogenate for mice that received no treatment (NT; open squares) or received a plasmid encoding an RSV-specific shRNA (RSV; filled squares) was 4.0 or 4.1, respectively. In mice that received plasmid capable of serving as a template for NP-1496a shRNA (NP; open circles), the average log₁₀TCID₅₀ of the lung homogenate was 3.4. In mice that received plasmid capable of serving as a template for PB1-2257 shRNA (PB; open triangles), the average log₁₀TCID₅₀ of the lung homogenate was 3.8. In mice that received plasmids capable of serving as templates for NP and PB shRNAs (NP+PB1; filled circles), the average log₁₀TCID₅₀ of the lung homogenate was 3.2. The differences in virus titer in the lung homogenate between the group that received no treatment or RSV-specific shRNA plasmid and the groups that received NP shRNA plasmid, PB1 shRNA plasmid, or NP and PB1 shRNA plasmids had P values of 0.049, 0.124, and 0.004 respectively. Data for individual mice are presented in Table 10 (NT=no treatment). These results show that shRNA expressed from DNA vectors can be processed into siRNA to inhibit influenza virus production in mice and demonstrate that Infasurf is a suitable vehicle for the delivery of plasmids from which shRNA can be expressed. In particular, these data indicate that shRNA targeted to the influenza NP and/or PB1 transcripts reduced the virus titer in the lung when administered following virus infection.

TABLE 10
Inhibition of influenza virus production by shRNA expressed in mice

| | |
|---|---|
| Treatment | log₁₀TCID50 |

| | | | | |
|---|---|---|---|---|
| NT | 4.3 | 4.0 | 4.0 | 4.3 |
| RSV (60 μg) | 4.3 | 4.0 | 4.0 | 4.0 |
| NP (60 μg) | 4.0 | 3.7 | 3.0 | 3.0 |
| PB1 (60 μg) | 4.0 | 4.0 | 3.7 | 3.3 |
| NP + PB1 (60 μg | 3.7 | 3.3 | 3.0 | 3.0 |
| each) | | | | |

### Example 10A

### Inhibition of Luciferase Activity in the Lung by Delivery of siRNA to the Vascular System or the Respiratory Tract

[0246] siRNAs were obtained from Dharmacon and were deprotected and annealed as described above. siRNA sequences for NP (NP-1496), PA (PA-2087), PB1 (PB1-2257), and GFP were as given above. Luc-specific siRNA was as described in (McCaffrey, A P, et al., Nature, 418:38-39)

[0247] pCMV-luc DNA (Promega) was mixed with PEI (Qbiogene, Carlsbad, Calif.) at a nitrogen/phosphorus molar ratio (N/P ratio) of 10 at room temperature for 20 min. For i.v. administration, 200 μl of the mixture containing 60 μg of DNA was injected retroorbitally into 8 week old male C57BL/6 mice (Taconic Farms). For intratracheal (i.t.) adminstration, 50 μl of the mixture containing 30 μg or 60 μg of DNA was administered into the lungs of anesthetized mice using a Penn Century Model IA-IC insufflator.

[0248] siRNA-PEI compositions were formed by mixing 60 μg of luc-specific or GFP-specific siRNA with jetPEI at an N/P ratio of 5 at room temperature for 20 min. For i.v. administration, 200 μl of the mixture containing the indicated amounts of siRNA was injected retroorbitally. For pulmonary administration, 50 μl was delivered intratracheally.

[0249] At various times after pCMV-luc DNA administration, lungs, spleen, liver, heart, and kidney were harvested and homogenized in Cell Lysis Buffer (Marker Gene Technologies, Eugene, Oreg.). Luminescence was analyzed with the Luciferase Assay System (Promega) and measured with an Optocomp® I luminometer (MGM Instruments, Hamden, Conn.). The protein concentrations in homogenates were measured by the BCA assay (Pierce).

[0250] To determine the tissue distribution of PEI-mediated nucleic acid delivery in mice, pCMV-luc DNA-PEI complexes were injected i.v., and 24 hr later, Luc activity was measured in various organs. Activity was highest in the lungs, where Luc activity was detected for at least 4 days, whereas in heart, liver, spleen, and kidney, levels were 100-1,000 times lower and were detected for a shorter time after injection. When DNA-PEI complexes were instilled i.t., significant Luc activity was also detected in the lungs, although at a lower level than after i.v. adminstration.

[0251] To test the ability of PEI to promote uptake of siRNAs by the lungs following i.v. administration, mice were first given pCMV-luc DNA-PEI complexes i.t., followed by i.v. injection of Luc-specific siRNA complexed with PEI, control GFP-specific siRNA complexed with PEI, or the same volume of 5% glucose. Twenty-four hours later, Luc activity in the lungs was 17-fold lower in mice that received Luc siRNA than in those given GFP siRNA or no treatment. Because Luc siRNA can inhibit Luc expression only in the same lung cells that were transfected with the DNA vector, these results indicate that i.v. injection of a siRNA-PEI mixture achieves effective inhibition of a target transcript in the lung.

[0252] To test the ability of PEI to promote uptake of siRNAs by the lungs following pulmonary administration, mice were first given pCMVDNA-PEI complexes i.v., followed immediately by i.t. administration of Luc-specific siRNA mixed with PEI, control GFP-specific siRNA mixed with PEI, or the same volume of 5% glucose. Twenty-four hours later, luciferase activities were assayed in lung homogenates. Luciferase activity was 6.8-fold lower in mice that were treated with luciferase siRNA than those treated with GFP siRNA. These results indicate that pulmonary administration of an siRNA-PEI mixture achieves effective inhibition of a target transcript in lung cells.

### Example 10B

### Inhibition of Cyclophilin B in the Lung by Delivery of siRNA to the Respiratory System

[0253] Cyclophilin B is an endogenous gene that is widely expressed in mammals. To assess the ability of siRNA delivered directly to the respiratory system to inhibit expression of an endogenous gene, outbred Blackswiss mice (around 30 g or more body weight) were anesthetized by isofluorane/oxygen, and siRNA targeted to cyclophilin B (Dharmacon, D-001136-01-20 siCONTROL Cyclophilin B siRNA (Human/Mouse/Rat) or control GFP-949 siRNA (2 mg/kg) was administered intranasally to groups of 2 mice for each siRNA. Lungs were harvested 24 hours after administration. RNA was extracted from the lung and reverse transcription was done using a random primer. Real time PCR was then performed using cyclophilin B and GAPDH Taqman gene expression assay (Applied Biosystems). Results (Table 11-1) showed 70% silencing of cyclophilin B by siRNA targeted to cyclophilin B.

TABLE 11
Inhibition of Cyclophilin B in the Lung

| | | Ave | |
|---|---|---|---|
| Average | Normalized | normal | silencing % |
| PBS-1 | 5.395406 | 4.288984 | |
| PBS-2 | 3.182562 | | |
| GFP-1 | 2.547352 | 3.752446 | 12.50968 |
| GFP-2 | 4.957539 | | |
| Cyclo-1 | 1.173444 | 1.256672 | 70.7 |
| Cyclo-2 | 1.339901 | | |

TABLE 11-2

Target Portions in NP Gene

| | | |
|---|---|---|
| ID | | Nucleo- |
| Num- | | tide |
| ber | Sequence | Position |

| | | | |
|---|---|---|---|
| 1 | agcaaaagcaggguagaua | (SEQ ID NO: 10786) | 1-19 |
| 2 | gcaaaagcaggguagauaa | (SEQ ID NO: 10787) | 2-20 |
| 3 | caaaagcaggguagauaau | (SEQ ID NO: 10788) | 3-21 |
| 4 | aaaagcaggguagauaauc | (SEQ ID NO: 10789) | 4-22 |
| 5 | aaagcaggguagauaauca | (SEQ ID NO: 10790) | 5-23 |
| 6 | aagcaggguagauaaucac | (SEQ ID NO: 10791) | 6-24 |

### Example 11

### Inhibition of Influenza Virus by Direct Delivery of Naked siRNA to the Respiratory System

### Materials and Methods

[0254] siRNA preparation, viral infection, lung harvests, and influenza virus titer assays were performed as described above. Mice were anesthetized using isofluorane (administered by inhalation). siRNA was delivered in a volume of 50 μl by intranasal drip. p values were computed using Student's T test.

### Results

[0255] siRNA (NP-1496) in phosphate buffered saline (PBS) was administered to groups of mice (5 mice per group). Mice were infected with influenza virus (2000 PFU) 3 hours after siRNA administration. Lungs were harvested 24 hours post-infection and virus titer measured. In a preliminary experiment mice were anesthetized with avertin and 2 mg/kg siRNA was administered by intranasal drip. A reduction in virus titer relative to controls was observed, although it did not reach statistical significance (data not shown).

[0256] In a second experiment, Black Swiss mice were anesthetized using isofluorane/O₂. Various amounts of siRNA in PBS was intranasally administered into the mice., 50 ul each mouse. Three different groups (5 mice per group) received doses of 2 mg/kg, 4 mg/kg, or 10 mg/kg siRNA in PBS by intranasal drip. A fourth group that received PBS alone served as a control. Three hours later, the mice were anesthetized again using isofluorane/O₂, 30 ul of PR8 virus (2000 pfu=4×lethal dose) was intranasally administered into the mice. 24 h after infection, the mouse lungs were harvested, homogenized and virus titer was measured by evaluation of the TCID₅₀ as described above. Serial 5-fold dilutions of the lung homogenate were performed rather than 10-fold dilutions.

[0257] A significant and dose-dependent difference in virus titer was seen between mice in each of the three treated groups and the controls (Table 12). The reduction in virus titer relative to controls was 3.45-fold (p=0.0125), 4.16-fold (p=0.0063), and 4.62-fold (p=0.0057) in the groups that received doses of 2 mg/kg, 4 mg/kg, and 10 mg/kg respectively.

[0258] In summary, these results demonstrate the efficacy of siRNA delivered to the respiratory system in an aqueous medium in the absence of specific agents to enhance delivery.

TABLE 12
Intranasal Delivery of Naked siRNA Inhibits Influenza Virus
Production

| Treatment | log₁₀TCID50 | | | | | Average | P value |
|---|---|---|---|---|---|---|---|
| PBS | 26718.37 | 45687.78 | 45687.78 | 15625 | 26718.37 | 32087.46 | |
| NP (2 mg/kg) | 15625 | 15625 | 3125 | 3125 | 9137.56 | 9327.51 | 0.008 |
| NP (4 mg/kg) | 9137.56 | 9137.56 | 5343.68 | 9137.56 | 5343.68 | 7620 | 0.004 |
| NP (10 mg/kg) | 9137.56 | 9137.56 | 9137.56 | 3125 | 3125 | 6732.53 | 0.003 |

### Example 12

### Inhibition of Influenza Virus Production in Mice by Direct Delivery of Naked siRNA to the Respiratory System

[0259] This example confirms results above and demonstrates inhibition of influenza virus production in the lung by administration of siRNA targeted to NP to the respiratory system in an aqueous medium in the absence of delivery-enhancing agents. Six μg, 15 ug, 30 μg, and 60 μg of NP-1496 siRNAs or 60 μg of GFP-949 siRNAs in PBS were intranasally instilled into mice essentially as described above, except that mice were intranasally infected with PR8 virus, 1000 pfu per mouse, two hours after siRNA delivery. Lungs were harvested 24 hours after infection. NP-specific siRNA was effective for the inhibition of influenza virus when administered by intranasal instillation in an aqueous medium in the absence of delivery agents. A significant and dose-dependent difference in virus titer was seen between mice in each of the three treated groups and the controls (Table 13).

TABLE 13
Inhibition of Influenza Virus Production in the Lung Using Naked siRNA

| Treatment | TCID50 | | | | | Average | P value |
|---|---|---|---|---|---|---|---|
| PBS | 125 | 365.5 | 213.7 | 365.5 | 125 | 239.95 | |
| GFP (60 μg) | 125 | 213.7 | 213.7 | 213.7 | 365.5 | 226.32 | |
| NP (6 μg) | 213.7 | 213.7 | 125 | 213.7 | 42.7 | 161.8 | 0.263 |
| NP (15 μg) | 125 | 125 | 42.7 | 25 | 73.1 | 78.17 | 0.024 |
| NP (30 μg) | 8.5 | 125 | 42.7 | 125 | 14.6 | 63.18 | 0.019 |
| NP (60 μg) | 73.1 | 14.6 | 25 | 25 | 25 | 32.54 | 0.006 |

### Example 13

### Modified SiRNAs Mediate Effective Silencing

[0260] To explore the silencing potential of siRNAs containing modified nucleotides, NP-1496 siRNA containing sense and antisense strands with 2′-O-methyl modifications at alternate ribonucleotides in each strand were synthesized and tested in comparison with unmodified NP-1496 siRNA. The 2′-O-methyl modified NP1496 siRNA sequences were as follows: (2′-O-methyl shown as “m” in front of the modified nucleotide):

[0261] Sense: 5′-GmGA mUCmU UmAU mUUmC UmUC mGGmA G dTdT-3′ (SEQ ID NO: 10792)

[0262] Antisense: 5′-mCUmC CmGA mAGmA AmAU mAAmG AmUC mC dTdT-3′ (SEQ ID NO: 10793)

[0263] The 2′-O-methyl modified NP1496 siRNA and unmodified NP1496 siRNA were transfected into Vero cells in 24-well plate using lipofectamine 2000 (Invitrogen) following the manufacturer's instructions. 6 hours after transfection, the culture media was aspirated. The cells were inoculated with 200 μl of PR8 virus at MOI of 0.1. The culture supernatant was collected at 24, 36 and 48 hours after infection. Virus titer was determined as described above. The 2′-O-methyl modified NP1496 showed slightly more inhibition of virus growth than unmodified NP1496. Results are shown in Table 14.

TABLE 14
Effective Inhibition of Influenza Virus Production Using
Modified siRNA

| HA units | 24 h | 36 h | 48 h |
|---|---|---|---|
| No siRNA control | 4 | 8 | 16 |
| Unmodified NP1496 (400 uM) | 1 | 2 | 8 |
| Modified NP1496 (100 uM) | 1 | 2 | 8 |
| Modified NP1496 (200 uM) | 1 | 2 | 4 |
| Modified NP1496 (400 uM) | 1 | 1 | 4 |

### Example 14

### Inhibition of Influenza Virus by Oraltracheal Delivery of Naked siRNA to the Respiratory System

[0264] siRNA preparation, viral infection, lung harvests, and influenza virus titer assays were performed as described above. Mice were anesthetized using avertin (administered by intraperitoneal injection). 1 mg/kg siRNA was delivered in a volume of 175 μl by oraltracheal injection.

[0265] siRNA (NP-1496), 1 mg/kg, and 30 ul Infasurf in 5% glucose was administered to groups of mice (5 mice per group). Mice were infected with influenza virus (2000 PFU) 3 hours after siRNA administration. Lungs were harvested 24 hours post-infection and virus titer measured.

[0266] In a second experiment, Black Swiss mice were anesthetized using intraperitoneally administered avertin. NP-1496 siRNA and GFP-949 siRNA in PBS was intratracheally administered into the mice, 50 μl each mouse. A third group that received PBS alone served as a control. Three hours later, the mice were anesthetized again using isofluorane/O₂, 30 ul of PR8 virus (2000 pfu=4×lethal dose) was intranasally administered into the mice. Twenty-four hours after infection, the mouse lungs were harvested, homogenized and virus titer was measured by evaluation of the TCID₅₀ as described above. Serial 5-fold dilutions of the lung homogenate were performed rather than 10-fold dilutions.

[0267] In summary, these results demonstrate the efficacy of siRNA delivered to the respiratory system in an aqueous medium in the absence of specific agents to enhance delivery.

### Example 15

### Nucleotide Mutation Tolerance Studies to Select siRNAs that Target a Broad Spectrum of Influenza Viruses

[0268] This example demonstrates that siRNAs whose antisense strands are less than 100% complementary to the targeted transcript within the inhibitory region (e.g., within the 19 base pair region that is complementary to the target transcript) mediate effective silencing. The results demonstrate that the RNAi agents described herein will effectively inhibit a wide range of influenza strains whose sequences vary from that of PR8 within the target portion.

[0269] A dual luciferase assay was used to evaluate the ability of siRNAs to inhibit expression of influenza genes that are not 100% complementary to the antisense strand of the siRNA within the 19 nucleotide inhibitory region. Mismatches derived from the alignment of human and avian influenza virus strains (using PR8 as standards) were introduced into the DNA vector (psiCHECK) using a site-directed mutagenesis kit (Stratagene), i.e., the influenza target site was modified to include either 1 or 2 differences relative to the PR8 sequence, with the specific differences corresponding to differences found in one or more of the human or avian influenza strains.

[0270] Table 15 shows results of an experiment demonstrating that variations in the viral NP target (target for NP-1496) do not substantially reduce RNAi activity. (The data shown is the average of triplicates). Mismatches at positions near the 5′ or 3′ end of the antisense strand, or near the middle, were tested.

TABLE 15
Effect of mismatches between antisense strand and target region
on silencing by NP-1496

| | | | | C12 | C15 | A18 |
|---|---|---|---|---|---|---|
| | | A3 to | T9 | to | to | to |
| | Original | G3 | to C9 | T 12 | T15 | G18 |
| Renilla luciferase | 85.6 | 81.8 | 58.3 | 67.8 | 72.9 | 54.7 |
| silencing (%) | | | | | | |
| Remaining silencing | 100 | 91.3 | 65.1 | 75.7 | 81.4 | 61.1 |
| comparing with original | | | | | | |
| (%) | | | | | | |

[0271] Variations in the viral PA target (target for PA-2087 or PA-8282) do not substantially reduce RNAi activity. However, G18 to A18 mutations found in 7 among 157 human influenza strains did substantially affect the RNA interference activity. Mismatches at positions near the 5′ or 3′ end of the antisense strand, or near the middle, were tested. The presence of two mismatches between the antisense strand inhibitory region and the target reduced the silencing by about 70-75%, but a useful degree of silencing was still observed (Table 16).

TABLE 16
Effect of mismatches between antisense strand and target region on silencing
by PA-2087 or PA-8242

| | | | | | | | | T6 to |
|---|---|---|---|---|---|---|---|---|
| | | | T6 | T6 | | | | C6 and |
| | | A4 to | to | to | C15 to | G18 to | A19 to | C15 to |
| | Original | G4 | A6 | C6 | T15 | A18 | G19 | T15 |
| Renilla luciferase | 91.7 | 80.8 | 75.9 | 88.8 | 87.5 | 7.0 | 89.3 | 26.8 |
| silencing (%) | | | | | | | | |
| Remaining | 100 | 88.1 | 82.8 | 96.9 | 95.5 | 7.6 | 97.4 | 29.3 |
| silencing | | | | | | | | |
| comparing with | | | | | | | | |
| original (%) | | | | | | | | |

[0272] Table 17 shows results of an experiment demonstrating that variations in the viral PB2 target (target for PB2-3817) do not substantially reduce RNAi activity. (The data shown is the average of triplicates).

TABLE 17
Effect of mismatches between antisense strand and target region
on silencing by PB2-3817

| | Original | A17 to G17 | A18 to T18 |
|---|---|---|---|
| Renilla luciferase | 86.7 | 73.4 | 75.8 |
| silencing (%) | | | |
| Remaining silencing | 100 | 100 | 87.4 |
| comparing with | | | |
| original (%) | | | |

[0273] Table 18 shows results of an experiment demonstrating that variations in the viral PB1 target (target for PB1-6124) do not substantially reduce RNAi activity. (The data shown is the average of triplicates). Mismatches at positions near the 5′ or 3′ end of the antisense strand, or near the middle, were tested. The presence of two mismatches between the antisense strand inhibitory region and the target reduced the silencing by about 70-75%, but a useful degree of silencing was still observed.

TABLE 18
Effect of mismatches between antisense strand and target region on silencing
by PB1-6124

| | | C15 to | A1 to | T2 to | G3 to | A1 to T1 and G3 |
|---|---|---|---|---|---|---|
| PB1 (Lab ID# 6124 siRNA) | Original | T15 | G1 | C2 | A3 | to A3 |
| Ranilla luciferase silencing | 84.1 | 71.8 | 82.8 | 84.5 | 74.9 | 73.9 |
| (%) | | | | | | |
| Remaining silencing | 100 | 85.4 | 98.5 | 100 | 89.1 | 87.9 |
| comparing with original (%) | | | | | | |

effect of mismatches between antisense strand and target region on silencing
by PB1-6129.

| | | T3 to | T7 to | T2 to | C10 to | T3 to C3 and C10 |
|---|---|---|---|---|---|---|
| PB1 (Lab ID# 6129 siRNA) | Original | C3 | C7 | C2 | T10 | to T10 |
| Ranilla luciferase silencing | 86.4 | 87.3 | 84.4 | 84.5 | 81.3 | 59.0 |
| (%) | | | | | | |
| Remaining silencing | 100 | 100 | 97.8 | 100 | 94.2 | 68.3 |
| comparing with original (%) | | | | | | |

[0274] In addition to the results shown in the tables above, the present example also demonstrates that ten exemplary siRNAs duplexes of the present invention tolerate mismatches between the nucleotide sequence of the anti-sense strand of the siRNA and the nucleotide sequence of the targeted regions of viral transcripts. In the instant example, the capacity of the 21 previously identified siRNA to tolerate target sequence mutations was determined. To accomplish this, the target sites of all human and avian influenza gene sequences (available at www.lan1.flu.gov) were aligned using the PR8 strain as a reference. Single nucleotide polymorphism (SNPs) were identified and introduced into the dual-luciferase reporter construct using site-directed mutagenesis. Expression vectors containing the control target sequence (PR8) or the variants were subsequently transfected into Vero cells along with the 50 nM of the appropriate targeting siRNAs to determine the sensitivity of each siRNA to tolerate nucleotide mismatches.

[0275] Of the 21 siRNAs, ten siRNAs exhibited high degrees of silencing (% silencing) and were highly tolerant of target site polymorphisms. Table 19 summarizes the percent silencing data for the ten siRNAs (INFsi-1 through INFsi-8 and G1499 and G4276). The nucleotide sequence for each siRNA is shown and the nucleotides that were the target for site-directed mutagenesis are bolded and underlined. The “Mismatch” column illustrates the original nucleotide and its position, shown in parenthesis, within the siRNA along with the nucleotide that was substituted for the original nucleotide (mutated nucleotide). The percent silencing is presented as percentage of silencing observed with the native (PR8) silencing. Therefore, 100% relative silencing indicates that the mismatch had no effect on the functionality of the siRNA compared to its ability to silence the exact match target sequence (PR8). Any decrease in the percent relative silencing represents the degree of sensitivity of the siRNA for that mismatch in the target sequence (i.e., a lower percentage equates to a decrease in the functionality of the siRNA; “functionality” defined in this context as the ability of the siRNA to degrade it target RNA).

TABLE 19

Sensitivity of siRNAs to Naturally Occurring
Target Site Point Mutations.

| | |
|---|---|
| Mismatch | Rela- |

| | | Original | Mutated | tive |
|---|---|---|---|---|
| | | Nucleo- | Nucleo- | % |
| | | tide | tide | Si- |
| | siRNA Nucleotide | (Posi- | (Posi- | lenc- |
| siRNA | Sequence* | tion) | tion) | ing |
| G3789 | CGGGACTCTAGCATACTTA | G(3) | A(3) | 100% |
| (INFsi- | (SEQ ID NO: 11482) | G(4) | A(4) | 100% |
| 1) | | C(8) | T(8) | 72.4% |
| | | T(9) | C(9) | 50.1% |
| | | A(15) | G(15) | 81.9% |
| | | C(16) | G(16) | 0 |
| | | T(18) | G(18) | 74.2% |
| G3807 | ACTGACAGCCAGACAGCGA | C(2) | A(2) | 100% |
| (INFsi- | (SEQ ID NO: 11483) | C(6) | T(6) | 91.8% |
| 2) | | C(9) | T(9) | 50.7% |
| | | A(15) + | G(15) + | 41.5% |
| | | G(16) | A(16) | |
| G3817 | AGACAGCGACCAAAAGAAT | A(17) | G(17) | 100% |
| (INFsi- | (SEQ ID NO: 11484) | A(18) | T(18) | 87% |
| 3) | | A(18) | C(18) | 80.5% |
| | | T(19) | C(19) | 95.7% |
| | | T(19) | A(19) | 100% |
| G6124 | ATGAAGATCTGTTCCACCA | A(1) | T(1) | 100% |
| (INFsi- | (SEQ ID NO: 11485) | A(1) | G(1) | 98.5% |
| 4) | | T(2) | C(2) | 100% |
| | | G(3) | A(3) | 89.1% |
| | | A(5) | G(5) | 94.7% |
| | | T(8) | C(8) | 77% |
| | | T(12) | C(12) | 100% |
| | | C(15) | T(15) | 85.4% |
| | | A(1) + | T(1) + | 87.9% |
| | | G(3) | A(3) | |
| | | T(8) + | C(8) + | 32.2% |
| | | C(15) | T(15) | |
| G6129 | GATCTGTTCCACCATTGAA | T(3) | C(3) | 100% |
| (INFsi- | (SEQ ID NO: 11486) | T(7) | C(7) | 97.8% |
| 5) | | C(10) | T(10) | 94.2% |
| | | T(3) + | C(3) + | 68.3% |
| | | C(10) | T(10) | |
| G8282 | GCAATTGAGGAGTGCCTGA | A(4) | G(4) | 88.1% |
| (INFsi- | (SEQ ID NO: 11487) | T(6) | A(6) | 82.8% |
| 6) | | T(6) | C(6) | 96.9% |
| | | C(15) | T(15) | 95.5% |
| | | G(18) | A(18) | 7.6% |
| | | A(19) | G(19) | 97.4% |
| | | T(6) + | C(6) + | 29.3% |
| | | C(15) | T(15) | |
| G8286 | TTGAGGAGTGCCTGATTAA | T(2) | C(2) | 100% |
| (INFsi- | (SEQ ID NO: 11488) | T(2) | A(2) | 100% |
| 7) | | G(8) | A(8) | 100% |
| | | C(11) | T(11) | 100% |
| | | G(14) | A(14) | 85.2% |
| | | A(15) | G(15) | 95.4% |
| G1498 | GGATCTTATTTCTTCGGAG | A(3) | G(3) | 95.7% |
| (INFsi- | (SEQ ID NO: 11489) | T(9) | C(9) | 86.5% |
| 8) | | C(12) | T(12) | 85.4% |
| | | C(15) | T(15) | 91.7% |
| | | A(18) | G(18) | 94.4% |
| G1499 | GATCTTATTTCTTCGGAGA | A(2) | G(2) | 63.6% |
| | (SEQ ID NO: 11490) | T(8) | C(8) | 27.5% |
| | | C(11) | T(11) | 38.3% |
| | | C(14) | T(14) | 36.8% |
| | | A(17) | G(17) | 33.2% |
| G4276 | ACCTATGACTGGACTCTAA | C(3) | A(3) | 100% |
| | (SEQ ID NO: 11491) | C(3) | T(3) | 99.5% |
| | | A(5) | T(5) | 95.1% |
| | | T(6) | C(6) | 99% |
| | | C(9) | T(9) | 89.5% |
| | | T(15) | C(15) | 88.1% |
| | | T(15) | G(15) | 57.4% |
| | | T(15) | A(15) | 40.8% |
| | | C(16) | T(16) | 47.5% |
| | | A(18) | G(18) | 82.2% |
| | | C(9) + | T(9) + | 17.4% |
| | | T(15) | A(15) | |
| | | C(16) + | T(16) + | 28.4% |
| | | A(18) | G(18) | |
| | | T(15) + | G(15) + | 4.9% |
| | | C(16) + | T(16) + | |
| | | A(18) | G(18) | |
| | | T(15) + | A(15) + | 10.3% |
| | | C(16) + | T(16) + | |
| | | A(18) | G(18) | |
| | | C(3) + | T(3) + | 7.6% |
| | | A(5) + | T(5) + | |
| | | T(6) + | C(6) + | |
| | | C(9) + | T(9) + | |
| | | A(18) | G(18) | |

[0276] As shown in Table 19, only 19 of the 70 avian/human targets containing SNPs disrupted siRNA functionality by more than 30%. Two of these mutants, INFsi-2 have changes at position 9 (Mutation-9 for siRNA INFsi-2 and Mutation-4 for siRNA INFsi-1), which is adjacent to the RISC mediated cleavage site and predicted to be particularly sensitive to base pair mismatches. Surprisingly, three of the four variants containing two target site polymorphisms showed significant reductions in the levels of target cleavage (e.g. siRNA INFsi-4). None of the variants carrying the individual polymorphisms significantly impeded siRNA functionality.

[0277] These data show that ten siRNAs exhibited broad targeting properties against the majority of human and avian influenza virus strains demonstrating that these ten siRNAs have great potential as a multi-gene targeting strategy for effective RNAi therapeutics.

[0278] In Table 20, the most highly conserved sequences from Table 2 have been matched to additional 19-mer sequences taken from other members of the influenza A viral sequence variants that differ from the primary 9-mer sequence by having only one or a few nucleotide mismatches. The 19-mer sequences in Table 20 are obtained by searching the list of sequences described in Table 1 using the highly conserved 19-mer sequence fragments shown in Table 2 as the reference sequence. For each 19-mer reference sequence, a target fragment is found in each of the target influenza A viral sequences that is the most closely matching 19-mer fragment. The most-closely matching target fragments are those that have the fewest number of nucleotide differences between the reference fragment and the target fragment. If two target fragments have the same number of nucleotide differences with the reference fragment, then preference is given to the target fragment that can form more GU wobble base pairs between the sense strand of the target fragment and the antisense strand of the reference fragment.

TABLE 20-1

Conserved and minor variant 19-mer sequences
from the Influenza A segment 1 (PB2) sequences
listed in Table 1-1. The conserved sequences
match at least 89% of the listed viral se-
quences, and the variants contain 3 or fewer
nucleotide changes from the reference sequence.

| | | | |
|---|---|---|---|
| Seq | Ref | | % |
| ID | ID | Match Seq | Total |

| | | | |
|---|---|---|---|
| 1 | 1 | GCCAGACAGCGACCAAAAG | 99.5% |
| 5484 | 1 | GCCAGACAGCGACCAAAgG | 0.1% |
| 5485 | 1 | GuCAGACAGCGACCAAAAG | 0.2% |
| 5486 | 1 | GCCAGACgaCGAuCAAAAG | 0.1% |
| 2 | 2 | AGCCAGACAGCGACCAAAA | 99.5% |
| 5487 | 2 | AGCCAGACAGCGACCAAAg | 0.1% |
| 5488 | 2 | AGuCAGACAGCGACCAAAA | 0.2% |
| 5489 | 2 | AGCCAGACgaCGAuCAAAA | 0.1% |
| 3 | 3 | ACAGCCAGACAGCGACCAA | 99.3% |
| 5490 | 3 | ACAGuCAGACAGCGACCAA | 0.2% |
| 5491 | 3 | AuAGCCAGACAGCGACCAA | 0.3% |
| 5492 | 3 | ACAGCCAGACgaCGAuCAA | 0.1% |
| 4 | 4 | GACAGCCAGACAGCGACCA | 99.3% |
| 5493 | 4 | GACAGuCAGACAGCGACCA | 0.2% |
| 5494 | 4 | GAuAGCCAGACAGCGACCA | 0.3% |
| 5495 | 4 | GACAGCCAGACgaCGAuCA | 0.1% |
| 5 | 5 | CAGACAGCGACCAAAAGAA | 99.3% |
| 5496 | 5 | CAGACAGCGACCAAAAGgA | 0.3% |
| 5497 | 5 | CAGACAGCGACCAAAgGAA | 0.1% |
| 5498 | 5 | CAGACAGCGACCAAAAGAu | 0.1% |
| 5499 | 5 | CAGACgaCGAuCAAAAGAA | 0.1% |
| 6 | 6 | CAGCCAGACAGCGACCAAA | 99.3% |
| 5500 | 6 | CAGuCAGACAGCGACCAAA | 0.2% |
| 5501 | 6 | uAGCCAGACAGCGACCAAA | 0.3% |
| 5502 | 6 | CAGCCAGACgaCGAuCAAA | 0.1% |
| 7 | 7 | AGACAGCGACCAAAAGAAU | 99.1% |
| 5503 | 7 | AGACAGCGACCAAAAGgAU | 0.3% |
| 5504 | 7 | AGACAGCGACCAAAgGAAU | 0.1% |
| 5505 | 7 | AGACAGCGACCAAAAGAuU | 0.1% |
| 5506 | 7 | AGACgaCGAuCAAAAGAAU | 0.1% |
| 8 | 8 | CCAGACAGCGACCAAAAGA | 99.1% |
| 5507 | 8 | CCAGACAGCGACCAAAAGg | 0.3% |
| 5508 | 8 | CCAGACAGCGACCAAAgGA | 0.1% |
| 5509 | 8 | uCAGACAGCGACCAAAAGA | 0.2% |
| 5510 | 8 | CCAGACgaCGAuCAAAAGA | 0.1% |
| 9 | 9 | ACAGCGACCAAAAGAAUUC | 99.1% |
| 5511 | 9 | ACAGCGACCAAAAGgAUUC | 0.3% |
| 5512 | 9 | ACAGCGACCAAAgGAAUUC | 0.1% |
| 5513 | 9 | ACAGCGACCAAAAGAuUUC | 0.1% |
| 5514 | 9 | ACgaCGAuCAAAAGAAUUC | 0.1% |
| 10 | 10 | UACUUACUGACAGCCAGAC | 99.1% |
| 5515 | 10 | UACUUACUGACAGUCAGAC | 0.2% |
| 5516 | 10 | UACUUACUGAuAGCCAGAC | 0.3% |
| 5517 | 10 | UgCUUACUGACAGCCAGAC | 0.1% |
| 5518 | 10 | UACUUACcGACAGCCAGAC | 0.2% |
| 11 | 11 | CAGCGACCAAAAGAAUUCG | 99.1% |
| 5519 | 11 | CAGCGACCAAAAGgAUUCG | 0.3% |
| 5520 | 11 | CAGCGACCAAAgGAAUUCG | 0.1% |
| 5521 | 11 | CAGCGACCAAAAGAuUUCG | 0.1% |
| 5522 | 11 | CgaCGAuCAAAAGAAUUCG | 0.1% |
| 12 | 12 | ACUUACUGACAGCCAGACA | 99.1% |
| 5523 | 12 | ACUUACUGACAGuCAGACA | 0.2% |
| 5524 | 12 | ACUUACUGAuAGCCAGACA | 0.3% |
| 5525 | 12 | gCUUACUGACAGCCAGACg | 0.1% |
| 5526 | 12 | ACUUACcGACAGCCAGACA | 0.2% |
| 13 | 13 | CAUACUUACUGACAGCCAG | 99.1% |
| 5527 | 13 | CAUACUUACUGACAGuCAG | 0.2% |
| 5528 | 13 | CAUACUUACUGAuAGCCAG | 0.3% |
| 5529 | 13 | CAUgCUUACUGACAGCCAG | 0.1% |
| 5530 | 13 | CAUACUUACcGACAGCCAG | 0.2% |
| 14 | 14 | CUUACUGACAGCCAGACAG | 99.1% |
| 5531 | 14 | CUUACUGACAGuCAGACAG | 0.2% |
| 5532 | 14 | CUUACUGAuAGCCAGACAG | 0.3% |
| 5533 | 14 | CUUACcGACAGCCAGACAG | 0.2% |
| 5534 | 14 | CUUACUGACAGCCAGACga | 0.1% |
| 15 | 15 | GACAGCGACCAAAAGAAUU | 99.1% |
| 5535 | 15 | GACAGCGACCAAAAGgAUU | 0.3% |
| 5536 | 15 | GACAGCGACCAAAgGAAUU | 0.1% |
| 5537 | 15 | GACAGCGACCAAAAGAuUU | 0.1% |
| 5538 | 15 | GACgaCGAuCAAAAGAAUU | 0.1% |
| 16 | 16 | AUACUUACUGACAGCCAGA | 99.1% |
| 5539 | 16 | AUACUUACUGACAGuCAGA | 0.2% |
| 5540 | 16 | AUACUUACUGAuAGCCAGA | 0.3% |
| 5541 | 16 | AUgCUUACUGACAGCCAGA | 0.1% |
| 5542 | 16 | AUACUUACcGACAGCCAGA | 0.2% |
| 17 | 17 | ACUGACAGCCAGACAGCGA | 99.0% |
| 5543 | 17 | ACUGACAGuCAGACAGCGA | 0.2% |
| 5544 | 17 | ACUGAuAGCCAGACAGCGA | 0.3% |
| 5545 | 17 | ACcGACAGCCAGACAGCGA | 0.2% |
| 5546 | 17 | ACUGACAGCCAGACgaCGA | 0.1% |
| 18 | 18 | GCAUACUUACUGACAGCCA | 99.0% |
| 5547 | 18 | GCAUACUUACUGACAGuCA | 0.2% |
| 5548 | 18 | GCAUACUUACUGAuAGCCA | 0.3% |
| 5549 | 18 | GCAUgCUUACUGACAGCCA | 0.1% |
| 5550 | 18 | aCAUACUUACUGACAGCCA | 0.1% |
| 5551 | 18 | GCAUACUUACcGACAGCCA | 0.2% |
| 19 | 19 | AGCAUACUUACUGACAGCC | 99.0% |
| 5552 | 19 | AGCAUACUUACUGACAGuC | 0.2% |
| 5553 | 19 | AGCAUACUUACUGAuAGCC | 0.3% |
| 5554 | 19 | AGCAUgCUUACUGACAGCC | 0.1% |
| 5555 | 19 | AaCAUACUUACUGACAGCC | 0.1% |
| 5556 | 19 | AGCAUACUUACcGACAGCC | 0.2% |
| 20 | 20 | UGACAGCCAGACAGCGACC | 99.0% |
| 5557 | 20 | UGACAGuCAGACAGCGACC | 0.2% |
| 5558 | 20 | UGAuAGCCAGACAGCGACC | 0.3% |
| 5559 | 20 | cGACAGCCAGACAGCGACC | 0.2% |
| 5560 | 20 | UGACAGCCAGACgaCGAuC | 0.1% |
| 21 | 21 | UACUGACAGCCAGACAGCG | 99.0% |
| 5561 | 21 | UACUGACAGuCAGACAGCG | 0.2% |
| 5562 | 21 | UACUGAuAGCCAGACAGCG | 0.3% |
| 5563 | 21 | UACcGACAGCCAGACAGCG | 0.2% |
| 5564 | 21 | UACUGACAGCCAGACgaCG | 0.1% |
| 22 | 22 | UUACUGACAGCCAGACAGC | 99.0% |
| 5565 | 22 | UUACUGACAGuCAGACAGC | 0.2% |
| 5566 | 22 | UUACUGAuAGCCAGACAGC | 0.3% |
| 5567 | 22 | UUACcGACAGCCAGACAGC | 0.2% |
| 5568 | 22 | UUACUGACAGCCAGACgaC | 0.1% |
| 23 | 23 | CUGACAGCCAGACAGCGAC | 99.0% |
| 5569 | 23 | CUGACAGuCAGACAGCGAC | 0.2% |
| 5570 | 23 | CUGAuAGCCAGACAGCGAC | 0.3% |
| 5571 | 23 | CcGACAGCCAGACAGCGAC | 0.2% |
| 5572 | 23 | CUGACAGCCAGACgaCGAu | 0.1% |
| 24 | 24 | ACUCUAGCAUACUUACUGA | 98.9% |
| 5573 | 24 | ACUCUAGCAUgCUUACUGA | 0.1% |
| 5574 | 24 | ACUuUAGCAUACUUACUGA | 0.2% |
| 5575 | 24 | ACUaUAGCAUACUUACUGA | 0.1% |
| 5576 | 24 | ACUCcAGCAUACUUACUGA | 0.3% |
| 5577 | 24 | ACUCUAaCAUACUUACUGA | 0.1% |
| 5578 | 24 | ACUCUAGCAUACUUACcGA | 0.2% |
| 25 | 25 | UAGCAUACUUACUGACAGC | 98.7% |
| 5579 | 25 | UAGCAUACUUACUGACAGu | 0.2% |
| 5580 | 25 | UAGCAUACUUACUGAuAGC | 0.3% |
| 5581 | 25 | UAGCAUgCUUACUGACAGC | 0.1% |
| 5582 | 25 | cAGCAUACUUACUGACAGC | 0.3% |
| 5583 | 25 | UAaCAUACUUACUGACAGC | 0.1% |
| 5584 | 25 | UAGCAUACUUACcGACAGC | 0.2% |
| 26 | 26 | CUCUAGCAUACUUACUGAC | 98.6% |
| 5585 | 26 | CUCUAGCAUACUUACUGAu | 0.3% |
| 5586 | 26 | CUCUAGCAUgCUUACUGAC | 0.1% |
| 5587 | 26 | GUuUAGCAUACUUACUGAC | 0.2% |
| 5588 | 26 | CUaUAGCAUACUUACUGAC | 0.1% |
| 5589 | 26 | CUCcAGCAUACUUACUGAC | 0.3% |
| 5590 | 26 | CUCUAaCAUACUUACUGAC | 0.1% |
| 5591 | 26 | CUCUAGCAUACUUACcGAC | 0.2% |
| 27 | 27 | CUAGCAUACUUACUGACAG | 98.6% |
| 5592 | 27 | CUAGCAUACUUACUGAuAG | 0.3% |
| 5593 | 27 | CUAGCAUgCUUACUGACAG | 0.1% |
| 5594 | 27 | uUAGCAUACUUACUGACAG | 0.2% |
| 5595 | 27 | aUAGCAUACUUACUGACAG | 0.1% |
| 5596 | 27 | CcAGCAUACUUACUGACAG | 0.3% |
| 5597 | 27 | CUAaCAUACUUACUGACAG | 0.1% |
| 5598 | 27 | CUAGCAUACUUACcGACAG | 0.2% |
| 28 | 28 | UCUAGCAUACUUACUGACA | 98.6% |
| 5599 | 28 | UCUAGCAUACUUACUGAuA | 0.3% |
| 5600 | 28 | UCUAGCAUgCUUACUGACA | 0.1% |
| 5601 | 28 | UuUAGCAUACUUACUGACA | 0.2% |
| 5602 | 28 | UaUAGCAUACUUACUGACA | 0.1% |
| 5603 | 28 | UCcAGCAUACUUACUGACA | 0.3% |
| 5604 | 28 | UCUAaCAUACUUACUGACA | 0.1% |
| 5605 | 28 | UCUAGCAUACUUACcGACA | 0.2% |
| 29 | 29 | CAAAAGAAUUCGGAUGGCC | 98.6% |
| 5606 | 29 | CAAAAGgAUUCGGAUGGCC | 0.2% |
| 5607 | 29 | CAAAgGAAUUCGGAUGGCC | 0.1% |
| 5608 | 29 | CAAAAGAAUUCGaAUGGCC | 0.6% |
| 5609 | 29 | CAAAAGAuUUCGGAUGGCC | 0.1% |
| 5610 | 29 | CAAAAGgAUUCGaAUGGCC | 0.1% |
| 30 | 30 | AAAAGAAUUCGGAUGGCCA | 98.6% |
| 5611 | 30 | AAAAGgAUUCGGAUGGCCA | 0.2% |
| 5612 | 30 | AAAgGAAUUCGGAUGGCCA | 0.1% |
| 5613 | 30 | AAAAGAAUUCGaAUGGCCA | 0.6% |
| 5614 | 30 | AAAAGAuUUCGGAUGGCCA | 0.1% |
| 5615 | 30 | AAAAGgAUUCGaAUGGCCA | 0.1% |
| 31 | 31 | GACCAAAAGAAUUCGGAUG | 98.5% |
| 5616 | 31 | GACCAAAAGgAUUCGGAUG | 0.2% |
| 5617 | 31 | GACCAAAgGAAUUCGGAUG | 0.1% |
| 5618 | 31 | GAuCAAAAGAAUUCGGAUG | 0.1% |
| 5619 | 31 | GACCAAAAGAAUUCGaAUG | 0.6% |
| 5620 | 31 | GACCAAAAGAuUUCGGAUG | 0.1% |
| 5621 | 31 | GACCAAAAGgAUUCGaAUG | 0.1% |
| 32 | 32 | CGACCAAAAGAAUUCGGAU | 98.5% |
| 5622 | 32 | CGACCAAAAGgAUUCGGAU | 0.2% |
| 5623 | 32 | CGACCAAAgGAAUUCGGAU | 0.1% |
| 5624 | 32 | CGAuCAAAAGAAUUCGGAU | 0.1% |
| 5625 | 32 | CGACCAAAAGAAUUCGaAU | 0.6% |
| 5626 | 32 | CGACCAAAAGAuUUCGGAU | 0.1% |
| 5627 | 32 | CGACCAAAAGgAUUCGaAU | 0.1% |
| 33 | 33 | AAAGAAUUCGGAUGGCCAU | 98.5% |
| 5628 | 33 | AAAGgAUUCGGAUGGCCAU | 0.2% |
| 5629 | 33 | AAgGAAUUCGGAUGGCCAU | 0.1% |
| 5630 | 33 | AAAGAAUUCGaAUGGCCAU | 0.6% |
| 5631 | 33 | AAAGAAUUCGGAUGGCCAc | 0.1% |
| 5632 | 33 | AAAGAuUUCGGAUGGCCAU | 0.1% |
| 5633 | 33 | AAAGgAUUCGaAUGGCCAU | 0.1% |
| 34 | 34 | AGCGACCAAAAGAAUUCGG | 98.5% |
| 5634 | 34 | AGCGACCAAAAGgAUUCGG | 0.2% |
| 5635 | 34 | AGCGACCAAAgGAAUUCGG | 0.1% |
| 5636 | 34 | AGCGACCAAAAGAAUUCGa | 0.6% |
| 5637 | 34 | AGCGACCAAAAGAuUUCGG | 0.1% |
| 5638 | 34 | AGCGACCAAAAGgAUUCGa | 0.1% |
| 5639 | 34 | gaCGAuCAAAAGAAUUCGG | 0.1% |
| 35 | 35 | GCGACCAAAAGAAUUCGGA | 98.5% |
| 5640 | 35 | GCGACCAAAAGgAUUCGGA | 0.2% |
| 5641 | 35 | GCGACCAAAgGAAUUCGGA | 0.1% |
| 5642 | 35 | GCGACCAAAAGAAUUCGaA | 0.6% |
| 5643 | 35 | GCGACCAAAAGAuUUCGGA | 0.1% |
| 5644 | 35 | aCGAuCAAAAGAAUUCGGA | 0.1% |
| 5645 | 35 | GCGACCAAAAGgAUUCGaA | 0.1% |
| 36 | 36 | CCAAAAGAAUUCGGAUGGC | 98.5% |
| 5646 | 36 | CCAAAAGgAUUCGGAUGGC | 0.2% |
| 5647 | 36 | CCAAAgGAAUUCGGAUGGC | 0.1% |
| 5648 | 36 | uCAAAAGAAUUCGGAUGGC | 0.1% |
| 5649 | 36 | CCAAAAGAAUUCGaAUGGC | 0.6% |
| 5650 | 36 | CCAAAAGAuUUCGGAUGGC | 0.1% |
| 5651 | 36 | CCAAAAGgAUUCGaAUGGC | 0.1% |
| 37 | 37 | ACCAAAAGAAUUCGGAUGG | 98.5% |
| 5652 | 37 | ACCAAAAGgAUUCGGAUGG | 0.2% |
| 5653 | 37 | ACCAAAgGAAUUCGGAUGG | 0.1% |
| 5654 | 37 | AuCAAAAGAAUUCGGAUGG | 0.1% |
| 5655 | 37 | ACCAAAAGAAUUCGaAUGG | 0.6% |
| 5656 | 37 | ACCAAAAGAuUUCGGAUGG | 0.1% |
| 5657 | 37 | ACCAAAAGgAUUCGaAUGG | 0.1% |
| 38 | 38 | GAAUUCGGAUGGCCAUCAA | 98.4% |
| 5658 | 38 | GAAUUCGGAUGGCCAUuAA | 0.2% |
| 5659 | 38 | GgAUUCGGAUGGCCAUCAA | 0.2% |
| 5660 | 38 | GAAUUCGaAUGGCCAUCAA | 0.6% |
| 5661 | 38 | GAAUUCGGAUGGCCAcCAA | 0.1% |
| 5662 | 38 | GAuUUCGGAUGGCCAUCAA | 0.1% |
| 5663 | 38 | GgAUUCGaAUGGCCAUCAA | 0.1% |
| 39 | 39 | UUCGGAUGGCCAUCAAUUA | 98.3% |
| 5664 | 39 | UUCGGAUGGCCAUuAAUUA | 0.2% |
| 5665 | 39 | UUCGaAUGGCCAUCAAUUA | 0.7% |
| 5666 | 39 | UUCGGAUGGCCAUCAAgUA | 0.1% |
| 5667 | 39 | UUCGGAUGGCCAUCAAUag | 0.1% |
| 5668 | 39 | UUCGGAUGGCCAcCAAUgA | 0.1% |
| 40 | 40 | AUUCGGAUGGCCAUCAAUU | 98.3% |
| 5669 | 40 | AUUCGGAUGGCCAUuAAUU | 0.2% |
| 5670 | 40 | AUUCGaAUGGCCAUCAAUU | 0.7% |
| 5671 | 40 | AUUCGGAUGGCCAUCAAgU | 0.1% |
| 5672 | 40 | AUUCGGAUGGCCAUCAAUa | 0.1% |
| 5673 | 40 | uUUCGGAUGGCCAUCAAUU | 0.1% |
| 5674 | 40 | AUUCGGAUGGCCAcCAAUg | 0.1% |
| 41 | 41 | GACUCUAGCAUACUUACUG | 98.3% |
| 5675 | 41 | GACUCUAGCAUgCUUACUG | 0.1% |
| 5676 | 41 | GACUuUAGCAUACUUACUG | 0.2% |
| 5677 | 41 | aACUCUAGCAUACUUACUG | 0.6% |
| 5678 | 41 | GACUaUAGCAUACUUACUG | 0.1% |
| 5679 | 41 | GACUCcAGCAUACUUACUG | 0.3% |
| 5680 | 41 | GACUCUAaCAUACUUACUG | 0.1% |
| 5681 | 41 | GACUCUAGCAUACUUACcG | 0.2% |
| 42 | 42 | AGAAUUCGGAUGGCCAUCA | 98.3% |
| 5682 | 42 | AGAAUUCGGAUGGCCAUuA | 0.2% |
| 5683 | 42 | AGgAUUCGGAUGGCCAUCA | 0.2% |
| 5684 | 42 | gGAAUUCGGAUGGCCAUCA | 0.1% |
| 5685 | 42 | AGAAUUCGaAUGGCCAUCA | 0.6% |
| 5686 | 42 | AGAAUUCGGAUGGCCAcCA | 0.1% |
| 5687 | 42 | AGAuUUCGGAUGGCCAUCA | 0.1% |
| 5688 | 42 | AGgAUUCGaAUGGCCAUCA | 0.1% |
| 43 | 43 | AAGAAUUCGGAUGGCCAUC | 98.3% |
| 5689 | 43 | AAGAAUUCGGAUGGCCAUu | 0.2% |
| 5690 | 43 | AAGgAUUCGGAUGGCCAUC | 0.2% |
| 5691 | 43 | AgGAAUUCGGAUGGCCAUC | 0.1% |
| 5692 | 43 | AAGAAUUCGaAUGGCCAUC | 0.6% |
| 5693 | 43 | AAGAAUUCGGAUGGCCAcC | 0.1% |
| 5694 | 43 | AAGAuUUCGGAUGGCCAUC | 0.1% |
| 5695 | 43 | AAGgAUUCGaAUGGCCAUC | 0.1% |
| 44 | 44 | AAUUCGGAUGGCCAUCAAU | 98.3% |
| 5696 | 44 | AAUUCGGAUGGCCAUuAAU | 0.2% |
| 5697 | 44 | gAUUCGGAUGGCCAUCAAU | 0.2% |
| 5698 | 44 | AAUUCGaAUGGCCAUCAAU | 0.6% |
| 5699 | 44 | AAUUCGGAUGGCCAcCAAU | 0.1% |
| 5700 | 44 | AAUUCGGAUGGCCAUCAAg | 0.1% |
| 5701 | 44 | AuUUCGGAUGGCCAUCAAU | 0.1% |
| 5702 | 44 | gAUUCGaAUGGCCAUCAAU | 0.1% |
| 45 | 45 | GGGACUCUAGCAUACUUAC | 98.1% |
| 5703 | 45 | GGGACUCUAGCAUgCUUAC | 0.1% |
| 5704 | 45 | GGGACUuUAGCAUACUUAC | 0.2% |
| 5705 | 45 | GaGACUCUAGCAUACUUAC | 0.4% |
| 5706 | 45 | GGaACUCUAGCAUACUUAC | 0.6% |
| 5707 | 45 | GGGACUaUAGCAUACUUAC | 0.1% |
| 5708 | 45 | GGGACUCcAGCAUACUUAC | 0.3% |
| 5709 | 45 | GGGACUCUAaCAUACUUAC | 0.1% |
| 46 | 46 | ACGGGACUCUAGCAUACUU | 98.0% |
| 5710 | 46 | ACGGGACUCUAGCAUgCUU | 0.1% |
| 5711 | 46 | ACGGGACUuUAGCAUACUU | 0.2% |
| 5712 | 46 | AaGGGACUCUAGCAUACUU | 0.1% |
| 5713 | 46 | ACGaGACUCUAGCAUACUU | 0.4% |
| 5714 | 46 | ACGGaACUCUAGCAUACUU | 0.6% |
| 5715 | 46 | ACGGGACUaUAGCAUACUU | 0.1% |
| 5716 | 46 | ACGGGACUCcAGCAUACUU | 0.3% |
| 5717 | 46 | ACGGGACUCUAaCAUACUU | 0.1% |
| 47 | 47 | AAACGGGACUCUAGCAUAC | 98.0% |
| 5718 | 47 | AAACGGGACUCUAGCAUgC | 0.1% |
| 5719 | 47 | AAACGGGACUuUAGCAUAC | 0.2% |
| 5720 | 47 | AAAaGGGACUCUAGCAUAC | 0.1% |
| 5721 | 47 | AAACGaGACUCUAGCAUAC | 0.4% |
| 5722 | 47 | AAACGGaACUCUAGCAUAC | 0.6% |
| 5723 | 47 | AAACGGGACUaUAGCAUAC | 0.1% |
| 5724 | 47 | AAACGGGACUCcAGCAUAC | 0.3% |
| 5725 | 47 | AAACGGGACUCUAaCAUAC | 0.1% |
| 48 | 48 | CGGGACUCUAGCAUACUUA | 98.0% |
| 5726 | 48 | CGGGACUCUAGCAUgCUUA | 0.1% |
| 5727 | 48 | CGGGACUuUAGCAUACUUA | 0.2% |
| 5728 | 48 | aGGGACUCUAGCAUACUUA | 0.1% |
| 5729 | 48 | CGaGACUCUAGCAUACUUA | 0.4% |
| 5730 | 48 | CGGaACUCUAGCAUACUUA | 0.6% |
| 5731 | 48 | CGGGACUaUAGCAUACUUA | 0.1% |
| 5732 | 48 | CGGGACUCcAGCAUACUUA | 0.3% |
| 5733 | 48 | CGGGACUCUAaCAUACUUA | 0.1% |
| 49 | 49 | AACGGGACUCUAGCAUACU | 98.0% |
| 5734 | 49 | AACGGGACUCUAGCAUgCU | 0.1% |
| 5735 | 49 | AACGGGACUuUAGCAUACU | 0.2% |
| 5736 | 49 | AAaGGGACUCUAGCAUACU | 0.1% |
| 5737 | 49 | AACGaGACUCUAGCAUACU | 0.4% |
| 5738 | 49 | AACGGaACUCUAGCAUACU | 0.6% |
| 5739 | 49 | AACGGGACUaUAGCAUACU | 0.1% |
| 5740 | 49 | AACGGGACUCcAGCAUACU | 0.3% |
| 5741 | 49 | AACGGGACUCUAaCAUACU | 0.1% |
| 50 | 50 | GGACUCUAGCAUACUUACU | 97.9% |
| 5742 | 50 | GGACUCUAGCAUgCUUACU | 0.1% |
| 5743 | 50 | GGACUuUAGCAUACUUACU | 0.2% |
| 5744 | 50 | aGACUCUAGCAUACUUACU | 0.4% |
| 5745 | 50 | GaACUCUAGCAUACUUACU | 0.6% |
| 5746 | 50 | GGACUaUAGCAUACUUACU | 0.1% |
| 5747 | 50 | GGACUCcAGCAUACUUACU | 0.3% |
| 5748 | 50 | GGACUCUAaCAUACUUACU | 0.1% |
| 5749 | 50 | GGACUCUAGCAUACUUACc | 0.2% |
| 51 | 51 | AUGAAACGAAAACGGGACU | 95.9% |
| 5750 | 51 | AUGAAACGgAAACGGGACU | 2.9% |
| 5751 | 51 | AUGAAACGAAAAaGGGACU | 0.1% |
| 5752 | 51 | AUGAAACGAAAACGaGACU | 0.3% |
| 5753 | 51 | AUGAAACGAAAACGGaACU | 0.5% |
| 5754 | 51 | AUGAAACGgAAACGaGACU | 0.1% |
| 5755 | 51 | AUGAAACGgAAACGGaACU | 0.1% |
| 52 | 52 | GAAAUGGAUGAUGGCAAUG | 95.8% |
| 5756 | 52 | GAAAUGGAUGAUGGCgAUG | 4.1% |
| 5757 | 52 | GAAgUGGAUGAUGGCAAUG | 0.1% |
| 53 | 53 | UGGAUGAUGGCAAUGAAAU | 95.8% |
| 5758 | 53 | UGGAUGAUGGCAAUGAgAU | 0.1% |
| 5759 | 53 | UGGAUGAUGGCgAUGAAAU | 4.1% |
| 54 | 54 | UGAAAUGGAUGAUGGCAAU | 95.8% |
| 5760 | 54 | UGAAAUGGAUGAUGGCgAU | 4.1% |
| 5761 | 54 | UGAAgUGGAUGAUGGCAAU | 0.1% |
| 55 | 55 | GGAUGAUGGCAAUGAAAUA | 95.8% |
| 5762 | 55 | GGAUGAUGGCAAUGAgAUA | 0.1% |
| 5763 | 55 | GGAUGAUGGCgAUGAAAUA | 4.1% |
| 56 | 56 | UGAAACGAAAACGGGACUC | 95.8% |
| 5764 | 56 | UGAAACGgAAACGGGACUC | 2.7% |
| 5765 | 56 | UGAAACGgAAACGGGACUu | 0.2% |
| 5766 | 56 | UGAAACGAAAAaGGGACUC | 0.1% |
| 5767 | 56 | UGAAACGAAAACGaGACUC | 0.3% |
| 5768 | 56 | UGAAACGAAAACGGaACUC | 0.5% |
| 5769 | 56 | UGAAACGAAAACGGGACUa | 0.1% |
| 5770 | 56 | UGAAACGgAAACGaGACUC | 0.1% |
| 5771 | 56 | UGAAACGgAAACGGaACUC | 0.1% |
| 57 | 57 | AAAUGGAUGAUGGCAAUGA | 95.8% |
| 5772 | 57 | AAAUGGAUGAUGGCgAUGA | 4.1% |
| 5773 | 57 | AAgUGGAUGAUGGCAAUGA | 0.1% |
| 58 | 58 | AUGGAUGAUGGCAAUGAAA | 95.7% |
| 5774 | 58 | AUGGAUGAUGGCAAUGAgA | 0.1% |
| 5775 | 58 | AUGGAUGAUGGCgAUGAAA | 4.1% |
| 5776 | 58 | gUGGAUGAUGGCAAUGAAA | 0.1% |
| 59 | 59 | AAUGGAUGAUGGCAAUGAA | 95.7% |
| 5777 | 59 | AAUGGAUGAUGGCAAUGAg | 0.1% |
| 5778 | 59 | AAUGGAUGAUGGCgAUGAA | 4.1% |
| 5779 | 59 | AgUGGAUGAUGGCAAUGAA | 0.1% |
| 60 | 60 | AUGAAAUGGAUGAUGGCAA | 95.7% |
| 5780 | 60 | AUGAAAUGGAUGAUGGCgA | 4.1% |
| 5781 | 60 | AUGAAgUGGAUGAUGGCAA | 0.1% |
| 5782 | 60 | gUGAAAUGGAUGAUGGCAA | 0.1% |
| 61 | 61 | GAAACGAAAACGGGACUCU | 95.5% |
| 5783 | 61 | GAAACGgAAACGGGACUCU | 2.7% |
| 5784 | 61 | GAAACGgAAACGGGACUuU | 0.2% |
| 5785 | 61 | GAAACGAAAAaGGGACUCU | 0.1% |
| 5786 | 61 | GAAACGAAAACGaGACUCU | 0.3% |
| 5787 | 61 | GAAACGAAAACGGaACUCU | 0.5% |
| 5788 | 61 | GAAACGAAAACGGGACUaU | 0.1% |
| 5789 | 61 | GAAACGAAAACGGGACUCc | 0.3% |
| 5790 | 61 | GAAACGgAAACGaGACUCU | 0.1% |
| 5791 | 61 | GAAACGgAAACGGaACUCU | 0.1% |
| 62 | 62 | AAACGAAAACGGGACUCUA | 95.5% |
| 5792 | 62 | AAACGgAAACGGGACUCUA | 2.7% |
| 5793 | 62 | AAACGgAAACGGGACUuUA | 0.2% |
| 5794 | 62 | AAACGAAAAaGGGACUCUA | 0.1% |
| 5795 | 62 | AAACGAAAACGaGACUCUA | 0.3% |
| 5796 | 62 | AAACGAAAACGGaACUCUA | 0.5% |
| 5797 | 62 | AAACGAAAACGGGACUaUA | 0.1% |
| 5798 | 62 | AAACGAAAACGGGACUCcA | 0.3% |
| 5799 | 62 | AAACGgAAACGaGACUCUA | 0.1% |
| 5800 | 62 | AAACGgAAACGGaACUCUA | 0.1% |
| 63 | 63 | AACGAAAACGGGACUCUAG | 95.4% |
| 5801 | 63 | AACGgAAACGGGACUCUAG | 2.7% |
| 5802 | 63 | AACGgAAACGGGACUuUAG | 0.2% |
| 5803 | 63 | AACGAAAAaGGGACUCUAG | 0.1% |
| 5804 | 63 | AACGAAAACGaGACUCUAG | 0.3% |
| 5805 | 63 | AACGAAAACGGaACUCUAG | 0.5% |
| 5806 | 63 | AACGAAAACGGGACUaUAG | 0.1% |
| 5807 | 63 | AACGAAAACGGGACUCcAG | 0.3% |
| 5808 | 63 | AACGAAAACGGGACUCUAa | 0.1% |
| 5809 | 63 | AACGgAAACGaGACUCUAG | 0.1% |
| 5810 | 63 | AACGgAAACGGaACUCUAG | 0.1% |
| 64 | 64 | GAAAACGGGACUCUAGCAU | 95.4% |
| 5811 | 64 | GgAAACGGGACUCUAGCAU | 2.7% |
| 5812 | 64 | GgAAACGGGACUuUAGCAU | 0.2% |
| 5813 | 64 | GAAAAaGGGACUCUAGCAU | 0.1% |
| 5814 | 64 | GAAAACGaGACUCUAGCAU | 0.3% |
| 5815 | 64 | GAAAACGGaACUCUAGCAU | 0.5% |
| 5816 | 64 | GAAAACGGGACUaUAGCAU | 0.1% |
| 5817 | 64 | GAAAACGGGACUCcAGCAU | 0.3% |
| 5818 | 64 | GAAAACGGGACUCUAaCAU | 0.1% |
| 5819 | 64 | GgAAACGaGACUCUAGCAU | 0.1% |
| 5820 | 64 | GgAAACGGaACUCUAGCAU | 0.1% |
| 65 | 65 | ACGAAAACGGGACUCUAGC | 95.4% |
| 5821 | 65 | ACGgAAACGGGACUCUAGC | 2.7% |
| 5822 | 65 | ACGgAAACGGGACUuUAGC | 0.2% |
| 5823 | 65 | ACGAAAAaGGGACUCUAGC | 0.1% |
| 5824 | 65 | ACGAAAACGaGACUCUAGC | 0.3% |
| 5825 | 65 | ACGAAAACGGaACUCUAGC | 0.5% |
| 5826 | 65 | ACGAAAACGGGACUaUAGC | 0.1% |
| 5827 | 65 | ACGAAAACGGGACUCcAGC | 0.3% |
| 5828 | 65 | ACGAAAACGGGACUCUAaC | 0.1% |
| 5829 | 65 | ACGgAAACGaGACUCUAGC | 0.1% |
| 5830 | 65 | ACGgAAACGGaACUCUAGC | 0.1% |
| 66 | 66 | CGAAAACGGGACUCUAGCA | 95.4% |
| 5831 | 66 | CGgAAACGGGACUCUAGCA | 2.7% |
| 5832 | 66 | CGgAAACGGGACUuUAGCA | 0.2% |
| 5833 | 66 | CGAAAAaGGGACUCUAGCA | 0.1% |
| 5834 | 66 | CGAAAACGaGACUCUAGCA | 0.3% |
| 5835 | 66 | CGAAAACGGaACUCUAGCA | 0.5% |
| 5836 | 66 | CGAAAACGGGACUaUAGCA | 0.1% |
| 5837 | 66 | CGAAAACGGGACUCcAGCA | 0.3% |
| 5838 | 66 | CGAAAACGGGACUCUAaCA | 0.1% |
| 5839 | 66 | CGgAAACGaGACUCUAGCA | 0.1% |
| 5840 | 66 | CGgAAACGGaACUCUAGCA | 0.1% |
| 67 | 67 | AAAACGGGACUCUAGCAUA | 95.3% |
| 5841 | 67 | AAAACGGGACUCUAGCAUg | 0.1% |
| 5842 | 67 | gAAACGGGACUCUAGCAUA | 2.7% |
| 5843 | 67 | gAAACGGGACUuUAGCAUA | 0.2% |
| 5844 | 67 | AAAAaGGGACUCUAGCAUA | 0.1% |
| 5845 | 67 | AAAACGaGACUCUAGCAUA | 0.3% |
| 5846 | 67 | AAAACGGaACUCUAGCAUA | 0.5% |
| 5847 | 67 | AAAACGGGACUaUAGCAUA | 0.1% |
| 5848 | 67 | AAAACGGGACUCcAGCAUA | 0.3% |
| 5849 | 67 | AAAACGGGACUCUAaCAUA | 0.1% |
| 5850 | 67 | gAAACGaGACUCUAGCAUA | 0.1% |
| 5851 | 67 | gAAACGGaACUCUAGCAUA | 0.1% |
| 68 | 68 | GAAAGGUUAAAACAUGGAA | 94.9% |
| 5852 | 68 | GAAAGGUUAAAACAUGGgA | 1.2% |
| 5853 | 68 | GAAAGGUUgAAACAUGGAA | 0.3% |
| 5854 | 68 | GAAAGaUUAAAACAUGGAA | 0.4% |
| 5855 | 68 | GAAAGGUUAAAAaAUGGAA | 0.4% |
| 5856 | 68 | GAAAGGUUAAAACAcGGAA | 0.1% |
| 5857 | 68 | GAAAGGcUAAAgCAUGGAA | 0.2% |
| 5858 | 68 | GAAAGGUUAAAgCAcGGAA | 0.1% |
| 5859 | 68 | GAAAGaUUAAAACAcGGAA | 2.2% |
| 5860 | 68 | GAAAGaUUAAAACAcGGgA | 0.1% |
| 69 | 69 | AAAGGUUAAAACAUGGAAC | 94.9% |
| 5861 | 69 | AAAGGUUAAAACAUGGgAC | 1.2% |
| 5862 | 69 | AAAGGUUgAAACAUGGAAC | 0.3% |
| 5863 | 69 | AAAGaUUAAAACAUGGAAC | 0.4% |
| 5864 | 69 | AAAGGUUAAAAaAUGGAAC | 0.4% |
| 5865 | 69 | AAAGGUUAAAACAcGGAAC | 0.1% |
| 5866 | 69 | AAAGGcUAAAgCAUGGAAC | 0.2% |
| 5867 | 69 | AAAGGUUAAAgCAcGGAAC | 0.1% |
| 5868 | 69 | AAAGaUUAAAACAcGGAAC | 2.2% |
| 5869 | 69 | AAAGaUUAAAACAcGGgAC | 0.1% |
| 70 | 70 | AAGGUUAAAACAUGGAACC | 94.8% |
| 5870 | 70 | AAGGUUAAAACAUGGAACu | 0.1% |
| 5871 | 70 | AAGGUUAAAACAUGGgACC | 1.2% |
| 5872 | 70 | AAGGUUgAAACAUGGAACC | 0.3% |
| 5873 | 70 | AAGaUUAAAACAUGGAACC | 0.4% |
| 5874 | 70 | AAGGUUAAAAaAUGGAACC | 0.4% |
| 5875 | 70 | AAGGUUAAAACAcGGAACC | 0.1% |
| 5876 | 70 | AAGGcUAAAgCAUGGAACC | 0.2% |
| 5877 | 70 | AAGGUUAAAgCAcGGAACC | 0.1% |
| 5878 | 70 | AAGaUUAAAACAcGGAACC | 2.2% |
| 5879 | 70 | AAGaUUAAAACAcGGgACC | 0.1% |
| 71 | 71 | GGUUAAAACAUGGAACCUU | 94.8% |
| 5880 | 71 | GGUUAAAACAUGGAACuUU | 0.1% |
| 5881 | 71 | GGUUAAAACAUGGgACCUU | 1.2% |
| 5882 | 71 | GGUUgAAACAUGGAACCUU | 0.3% |
| 5883 | 71 | GaUUAAAACAUGGAACCUU | 0.4% |
| 5884 | 71 | GGUUAAAAaAUGGAACCUU | 0.4% |
| 5885 | 71 | GGUUAAAACAcGGAACCUU | 0.1% |
| 5886 | 71 | GGcUAAAgCAUGGAACCUU | 0.2% |
| 5887 | 71 | GGUUAAAgCAcGGAACCUU | 0.1% |
| 5888 | 71 | GaUUAAAACAcGGAACCUU | 2.2% |
| 5889 | 71 | GaUUAAAACAcGGgACCUU | 0.1% |
| 72 | 72 | AGGUUAAAACAUGGAACCU | 94.8% |
| 5890 | 72 | AGGUUAAAACAUGGAACuU | 0.1% |
| 5891 | 72 | AGGUUAAAACAUGGgACCU | 1.2% |
| 5892 | 72 | AGGUUgAAACAUGGAACCU | 0.3% |
| 5893 | 72 | AGaUUAAAACAUGGAACCU | 0.4% |
| 5894 | 72 | AGGUUAAAAaAUGGAACCU | 0.4% |
| 5895 | 72 | AGGUUAAAACAcGGAACCU | 0.1% |
| 5896 | 72 | AGGcUAAAgCAUGGAACCU | 0.2% |
| 5897 | 72 | AGGUUAAAgCAcGGAACCU | 0.1% |
| 5898 | 72 | AGaUUAAAACAcGGAACCU | 2.2% |
| 5899 | 72 | AGaUUAAAACAcGGgACCU | 0.1% |
| 73 | 73 | CUCGCACUCGCGAGAUACU | 94.5% |
| 5900 | 73 | CUCGCACUCGCGAGAUAuU | 1.4% |
| 5901 | 73 | CUCGCACUCGuGAGAUACU | 0.1% |
| 5902 | 73 | CUCGCAuUCGCGAGAUACU | 0.1% |
| 5903 | 73 | uUCGCACUCGCGAGAUACU | 0.1% |
| 5904 | 73 | CcCGCACUCGCGAGAUACU | 2.0% |
| 5905 | 73 | CUCGCACaCGCGAGAUACU | 0.6% |
| 5906 | 73 | CUCGCACcCGCGAGAUACU | 0.5% |
| 5907 | 73 | CUCGCACUCGCGAaAUACU | 0.1% |
| 5908 | 73 | CUCGCACUCGCGgaAUACU | 0.1% |
| 5909 | 73 | uUCGCACaCGCGAGAUACU | 0.1% |
| 5910 | 73 | CcCGCACgCGCGAGAUACU | 0.2% |
| 5911 | 73 | CUCGCACUguCGAGAUACU | 0.1% |
| 74 | 74 | UCUCGCACUCGCGAGAUAC | 94.5% |
| 5912 | 74 | UCUCGCACUCGCGAGAUAu | 1.4% |
| 5913 | 74 | UCUCGCACUCGuGAGAUAC | 0.1% |
| 5914 | 74 | UCUCGCAuUCGCGAGAUAC | 0.1% |
| 5915 | 74 | UuUCGCACUCGCGAGAUAC | 0.1% |
| 5916 | 74 | UCcCGCACUCGCGAGAUAC | 2.0% |
| 5917 | 74 | UCUCGCACaCGCGAGAUAC | 0.6% |
| 5918 | 74 | UCUCGCACcCGCGAGAUAC | 0.5% |
| 5919 | 74 | UCUCGCACUCGCGAaAUAC | 0.1% |
| 5920 | 74 | UCUCGCACUCGCGgaAUAC | 0.1% |
| 5921 | 74 | UuUCGCACaCGCGAGAUAC | 0.1% |
| 5922 | 74 | UCcCGCACgCGCGAGAUAC | 0.2% |
| 5923 | 74 | UCUCGCACUguCGAGAUAC | 0.1% |
| 75 | 75 | UAAAAGCAGUUAGAGGUGA | 94.3% |
| 5924 | 75 | UAAAAGCgGUUAGAGGUGA | 0.3% |
| 5925 | 75 | UgAAAGCAGUUAGAGGUGA | 0.2% |
| 5926 | 75 | UAAAgGCAGUUAGgGGUGA | 0.1% |
| 5927 | 75 | UAAAAGCAGUcAGAGGUGA | 0.4% |
| 5928 | 75 | UAAAAGCAGUUAGAGGaGA | 0.7% |
| 5929 | 75 | UAAAAuCAGUUAGAGGUGA | 0.1% |
| 5930 | 75 | UAAAAGCAGUcAGgGGUGA | 0.1% |
| 5931 | 75 | UAAAgGCAGUccGAGGUGA | 2.2% |
| 76 | 76 | UCGGAUGGCCAUCAAUUAA | 94.2% |
| 5932 | 76 | UCGGAUGGCCAUCAAUUAg | 3.9% |
| 5933 | 76 | UCGGAUGGCCAUuAAUUAA | 0.2% |
| 5934 | 76 | UCGaAUGGCCAUCAAUUAA | 0.7% |
| 5935 | 76 | UCGGAUGGCCAUCAAgUAA | 0.1% |
| 5936 | 76 | UCGGAUGGCCAUCAAUagg | 0.1% |
| 5937 | 76 | UCGGAUGGCCAcCAAUgAg | 0.1% |
| 77 | 77 | AGGAUGAAAUGGAUGAUGG | 94.0% |
| 5938 | 77 | AGGAUGAAgUGGAUGAUGG | 0.1% |
| 5939 | 77 | AGGgUGAAAUGGAUGAUGG | 0.1% |
| 5940 | 77 | AGaAUGAAAUGGAUGAUGG | 5.8% |
| 78 | 78 | GGAUGAAAUGGAUGAUGGC | 94.0% |
| 5941 | 78 | GGAUGAAgUGGAUGAUGGC | 0.1% |
| 5942 | 78 | GGgUGAAAUGGAUGAUGGC | 0.1% |
| 5943 | 78 | GaAUGAAAUGGAUGAUGGC | 5.8% |
| 79 | 79 | UUAGGAUGAAAUGGAUGAU | 93.9% |
| 5944 | 79 | UUAGGAUGAAgUGGAUGAU | 0.1% |
| 5945 | 79 | UUAGGgUGAAAUGGAUGAU | 0.1% |
| 5946 | 79 | UcAGGAUGAAAUGGAUGAU | 0.1% |
| 5947 | 79 | UUAGaAUGAAAUGGAUGAU | 4.5% |
| 5948 | 79 | UcAGaAUGAAAUGGAUGAU | 1.3% |
| 80 | 80 | AUGGUUGCAUACAUGUUAG | 93.9% |
| 5949 | 80 | AUGGUUGCAUACAUGUUgG | 1.5% |
| 5950 | 80 | AUGGUUGCgUACAUGUUAG | 1.5% |
| 5951 | 80 | AUGaUUGCAUACAUGUUAG | 0.1% |
| 5952 | 80 | AUGGUcGCAUACAUGUUAG | 0.3% |
| 5953 | 80 | AUGGUgGCAUACAUGUUgG | 0.5% |
| 5954 | 80 | AUGGUgGCAUAuAUGUUgG | 2.0% |
| 81 | 81 | UAGGAUGAAAUGGAUGAUG | 93.9% |
| 5955 | 81 | UAGGAUGAAgUGGAUGAUG | 0.1% |
| 5956 | 81 | UAGGgUGAAAUGGAUGAUG | 0.1% |
| 5957 | 81 | cAGGAUGAAAUGGAUGAUG | 0.1% |
| 5958 | 81 | UAGaAUGAAAUGGAUGAUG | 4.5% |
| 5959 | 81 | cAGaAUGAAAUGGAUGAUG | 1.3% |
| 82 | 82 | UGGUUGCAUACAUGUUAGA | 93.9% |
| 5960 | 82 | UGGUUGCAUACAUGUUgGA | 1.5% |
| 5961 | 82 | UGGUUGCgUACAUGUUAGA | 1.5% |
| 5962 | 82 | UGaUUGCAUACAUGUUAGA | 0.1% |
| 5963 | 82 | UGGUcGCAUACAUGUUAGA | 0.3% |
| 5964 | 82 | UGGUgGCAUACAUGUUgGA | 0.5% |
| 5965 | 82 | UGGUgGCAUAuAUGUUgGA | 2.1% |
| 83 | 83 | CUUAGGAUGAAAUGGAUGA | 93.9% |
| 5966 | 83 | CUUAGGAUGAAgUGGAUGA | 0.1% |
| 5967 | 83 | CUUAGGgUGAAAUGGAUGA | 0.1% |
| 5968 | 83 | CUcAGGAUGAAAUGGAUGA | 0.1% |
| 5969 | 83 | CUUAGaAUGAAAUGGAUGA | 4.5% |
| 5970 | 83 | CUcAGaAUGAAAUGGAUGA | 1.3% |
| 84 | 84 | UUGCAUACAUGUUAGAGAG | 93.9% |
| 5971 | 84 | UUGCAUACAUGUUgGAGAG | 0.3% |
| 5972 | 84 | UUGCgUACAUGUUAGAGAG | 1.5% |
| 5973 | 84 | UcGCAUACAUGUUAGAGAG | 0.3% |
| 5974 | 84 | UUGCAUACAUGUUAGAaAG | 0.1% |
| 5975 | 84 | UgGCAUACAUGUUgGAGAG | 0.2% |
| 5976 | 84 | UUGCAUACAUGUUgGAaAG | 1.2% |
| 5977 | 84 | UgGCAUACAUGUUgGAaAG | 0.3% |
| 85 | 85 | ACUUAGGAUGAAAUGGAUG | 93.9% |
| 5978 | 85 | ACUUAGGAUGAAgUGGAUG | 0.1% |
| 5979 | 85 | ACUUAGGgUGAAAUGGAUG | 0.1% |
| 5980 | 85 | ACUcAGGAUGAAAUGGAUG | 0.1% |
| 5981 | 85 | ACUUAGaAUGAAAUGGAUG | 2.1% |
| 5982 | 85 | uCUUAGaAUGAAAUGGAUG | 2.3% |
| 86 | 86 | GUUGCAUACAUGUUAGAGA | 93.8% |
| 5983 | 86 | GUUGCAUACAUGUUgGAGA | 0.3% |
| 5984 | 86 | GUUGCgUACAUGUUAGAGA | 1.5% |
| 5985 | 86 | aUUGCAUACAUGUUAGAGA | 0.1% |
| 5986 | 86 | GUcGCAUACAUGUUAGAGA | 0.3% |
| 5987 | 86 | GUUGCAUACAUGUUAGAaA | 0.1% |
| 5988 | 86 | GUgGCAUACAUGUUgGAGA | 0.2% |
| 5989 | 86 | GUUGCAUACAUGUUgGAaA | 1.2% |
| 5990 | 86 | GUgGCAUACAUGUUgGAaA | 0.3% |
| 87 | 87 | UAAAACAUGGAACCUUUGG | 93.8% |
| 5991 | 87 | UAAAACAUGGAACuUUUGG | 0.1% |
| 5992 | 87 | UAAAACAUGGgACCUUUGG | 1.2% |
| 5993 | 87 | UAAAgCAUGGAACCUUUGG | 0.2% |
| 5994 | 87 | UgAAACAUGGAACCUUUGG | 0.3% |
| 5995 | 87 | UAAAAaAUGGAACCUUUGG | 0.4% |
| 5996 | 87 | UAAAACAcGGAACCUUUGG | 2.2% |
| 5997 | 87 | UAAAACAUGGAACCUUcGG | 1.2% |
| 5998 | 87 | UAAAACAUGGAACCUUnGG | 0.1% |
| 5999 | 87 | UAAAACAUGGAACCUUUaG | 0.1% |
| 6000 | 87 | UAAAACAcGGgACCUUUGG | 0.1% |
| 6001 | 87 | UAAAgCAcGGAACCUUUGG | 0.1% |
| 6002 | 87 | UAAAACAcGGAACCUUcGG | 0.1% |
| 88 | 88 | UUAAAACAUGGAACCUUUG | 93.8% |
| 6003 | 88 | UUAAAACAUGGAACuUUUG | 0.1% |
| 6004 | 88 | UUAAAACAUGGgACCUUUG | 1.2% |
| 6005 | 88 | UUgAAACAUGGAACCUUUG | 0.3% |
| 6006 | 88 | UUAAAAaAUGGAACCUUUG | 0.4% |
| 6007 | 88 | UUAAAACAcGGAACCUUUG | 2.2% |
| 6008 | 88 | UUAAAACAUGGAACCUUcG | 1.2% |
| 6009 | 88 | UUAAAACAUGGAACCUUnG | 0.1% |
| 6010 | 88 | UUAAAACAUGGAACCUUUa | 0.1% |
| 6011 | 88 | cUAAAgCAUGGAACCUUUG | 0.2% |
| 6012 | 88 | UUAAAACAcGGgACCUUUG | 0.1% |
| 6013 | 88 | UUAAAgCAcGGAACCUUUG | 0.1% |
| 6014 | 88 | UUAAAACAcGGAACCUUcG | 0.1% |
| 89 | 89 | GGUUGCAUACAUGUUAGAG | 93.8% |
| 6015 | 89 | GGUUGCAUACAUGUUgGAG | 0.3% |
| 6016 | 89 | GGUUGCgUACAUGUUAGAG | 1.5% |
| 6017 | 89 | GaUUGCAUACAUGUUAGAG | 0.1% |
| 6018 | 89 | GGUcGCAUACAUGUUAGAG | 0.3% |
| 6019 | 89 | GGUUGCAUACAUGUUAGAa | 0.1% |
| 6020 | 89 | GGUgGCAUACAUGUUgGAG | 0.2% |
| 6021 | 89 | GGUUGCAUACAUGUUgGAa | 1.2% |
| 6022 | 89 | GGUgGCAUACAUGUUgGAa | 0.3% |
| 90 | 90 | UGAUGGUUGCAUACAUGUU | 93.7% |
| 6023 | 90 | UGAUGGUUGCgUACAUGUU | 1.5% |
| 6024 | 90 | UaAUGGUUGCAUACAUGUU | 1.7% |
| 6025 | 90 | UGAUGaUUGCAUACAUGUU | 0.1% |
| 6026 | 90 | UGAUGGUcGCAUACAUGUU | 0.3% |
| 6027 | 90 | UGAUGGUgGCAUACAUGUU | 0.1% |
| 6028 | 90 | UaAUGGUgGCAUACAUGUU | 0.4% |
| 6029 | 90 | UaAUGGUgGCAUAuAUGUU | 2.0% |
| 91 | 91 | AUGAGAAUACUUGUAAGGG | 93.7% |
| 6030 | 91 | AUGAGAAUACUUGUgAGGG | 0.2% |
| 6031 | 91 | AUGAGAAUACUcGUAAGGG | 1.3% |
| 6032 | 91 | AUGAGAAUACUUGUAAGaG | 2.6% |
| 6033 | 91 | AUGAGAAUACUUGUgAGaG | 2.0% |
| 6034 | 91 | AUGACAAUACUUGUgAGaG | 0.1% |
| 92 | 92 | UGAGAAUACUUGUAAGGGG | 93.7% |
| 6035 | 92 | UGAGAAUACUUGUgAGGGG | 0.2% |
| 6036 | 92 | UGAGAAUACUcGUAAGGGG | 1.3% |
| 6037 | 92 | UGAGAAUACUUGUAAGaGG | 2.6% |
| 6038 | 92 | UGAGAAUACUUGUgAGaGG | 2.0% |
| 6039 | 92 | UGAcAAUACUUGUgAGaGG | 0.1% |
| 93 | 93 | CACUUAGGAUGAAAUGGAU | 93.7% |
| 6040 | 93 | CACUUAGGAUGAAgUGGAU | 0.1% |
| 6041 | 93 | CACUUAGGgUGAAAUGGAU | 0.1% |
| 6042 | 93 | uACUUAGGAUGAAAUGGAU | 0.2% |
| 6043 | 93 | CACUcAGGAUGAAAUGGAU | 0.1% |
| 6044 | 93 | CACUUAGaAUGAAAUGGAU | 2.1% |
| 6045 | 93 | CuCUUAGaAUGAAAUGGAU | 2.3% |
| 94 | 94 | GUUAAAACAUGGAACCUUU | 93.7% |
| 6046 | 94 | GUUAAAACAUGGAACuUUU | 0.1% |
| 6047 | 94 | GUUAAAACAUGGgACCUUU | 1.2% |
| 6048 | 94 | GUUgAAACAUGGAACCUUU | 0.3% |
| 6049 | 94 | aUUAAAACAUGGAACCUUU | 0.2% |
| 6050 | 94 | GUUAAAAaAUGGAACCUUU | 0.4% |
| 6051 | 94 | GUUAAAACAcGGAACCUUU | 0.1% |
| 6052 | 94 | GUUAAAACAUGGAACCUUc | 1.0% |
| 6053 | 94 | GUUAAAACAUGGAACCUUn | 0.1% |
| 6054 | 94 | GcUAAAgCAUGGAACCUUU | 0.2% |
| 6055 | 94 | GUUAAAgCAcGGAACCUUU | 0.1% |
| 6056 | 94 | aUUAAAACAcGGAACCUUU | 2.1% |
| 6057 | 94 | aUUAAAACAUGGAACCUUc | 0.2% |
| 6058 | 94 | aUUAAAACAcGGgACCUUU | 0.1% |
| 95 | 95 | UUGAUGGUUGCAUACAUGU | 93.5% |
| 6059 | 95 | UUGAUGGUUGCgUACAUGU | 1.5% |
| 6060 | 95 | cUGAUGGUUGCAUACAUGU | 0.2% |
| 6061 | 95 | UUaAUGGUUGCAUACAUGU | 1.7% |
| 6062 | 95 | UUGAUGaUUGCAUACAUGU | 0.1% |
| 6063 | 95 | UUGAUGGUcGCAUACAUGU | 0.3% |
| 6064 | 95 | cUGAUGGUgGCAUACAUGU | 0.1% |
| 6065 | 95 | UUaAUGGUgGCAUACAUGU | 0.4% |
| 6066 | 95 | UUaAUGGUgGCAUAuAUGU | 2.0% |
| 96 | 96 | GAUGGUUGCAUACAUGUUA | 93.4% |
| 6067 | 96 | GAUGGUUGCAUACAUGUUg | 0.3% |
| 6068 | 96 | GAUGGUUGCgUACAUGUUA | 1.5% |
| 6069 | 96 | aAUGGUUGCAUACAUGUUA | 0.5% |
| 6070 | 96 | GAUGaUUGCAUACAUGUUA | 0.1% |
| 6071 | 96 | GAUGGUcGCAUACAUGUUA | 0.3% |
| 6072 | 96 | aAUGGUUGCAUACAUGUUg | 1.2% |
| 6073 | 96 | GAUGGUgGCAUACAUGUUg | 0.1% |
| 6074 | 96 | aAUGGUgGCAUACAUGUUg | 0.4% |
| 97 | 97 | UCACUUAGGAUGAAAUGGA | 93.3% |
| 6075 | 97 | UCACUUAGGAUGAAgUGGA | 0.1% |
| 6076 | 97 | UCACUUAGGgUGAAAUGGA | 0.1% |
| 6077 | 97 | UuACUUAGGAUGAAAUGGA | 0.2% |
| 6078 | 97 | gCACUUAGGAUGAAAUGGA | 0.4% |
| 6079 | 97 | UCACUcAGGAUGAAAUGGA | 0.1% |
| 6080 | 97 | UCACUUAGaAUGAAAUGGA | 2.1% |
| 98 | 98 | AACAUGGAACCUUUGGCCC | 93.1% |
| 6081 | 98 | AACAUGGAACCUUUGGuCC | 1.1% |
| 6082 | 98 | AACAUGGAACuUUUGGCCC | 0.1% |
| 6083 | 98 | AACAUGGgACCUUUGGCCC | 1.1% |
| 6084 | 98 | AgCAUGGAACCUUUGGCCC | 0.2% |
| 6085 | 98 | AACAUGGgACCUUUGGuCC | 0.1% |
| 6086 | 98 | AAaAUGGAACCUUUGGCCC | 0.4% |
| 6087 | 98 | AACAcGGAACCUUUGGCCC | 2.2% |
| 6088 | 98 | AACAUGGAACCUUnGGCCC | 0.1% |
| 6089 | 98 | AACAUGGAACCUUUaGCCC | 0.1% |
| 6090 | 98 | AACAcGGgACCUUUGGCCC | 0.1% |
| 6091 | 98 | AACAUGGAACCUUcGGuCC | 1.2% |
| 6092 | 98 | AgCAcGGAACCUUUGGCCC | 0.1% |
| 6093 | 98 | AACAcGGAACCUUcGGCCC | 0.1% |
| 99 | 99 | AAACAUGGAACCUUUGGCC | 93.1% |
| 6094 | 99 | AAACAUGGAACCUUUGGuC | 1.1% |
| 6095 | 99 | AAACAUGGAACuUUUGGCC | 0.1% |
| 6096 | 99 | AAACAUGGgACCUUUGGCC | 1.1% |
| 6097 | 99 | AAgCAUGGAACCUUUGGCC | 0.2% |
| 6098 | 99 | AAACAUGGgACCUUUGGuC | 0.1% |
| 6099 | 99 | AAAaAUGGAACCUUUGGCC | 0.4% |
| 6100 | 99 | AAACAcGGAACCUUUGGCC | 2.2% |
| 6101 | 99 | AAACAUGGAACCUUnGGCC | 0.1% |
| 6102 | 99 | AAACAUGGAACCUUUaGCC | 0.1% |
| 6103 | 99 | AAACAcGGgACCUUUGGCC | 0.1% |
| 6104 | 99 | AAACAUGGAACCUUcGGuC | 1.2% |
| 6105 | 99 | AAgCAcGGAACCUUUGGCC | 0.1% |
| 6106 | 99 | AAACAcGGAACCUUcGGCC | 0.1% |
| 100 | 100 | CAAGCUGUGGAUAUAUGCA | 92.9% |
| 6107 | 100 | CAAGCUGUGGAUAUAUGuA | 0.1% |
| 6108 | 100 | CAgGCUGUGGAUAUAUGCA | 0.2% |
| 6109 | 100 | CAAGCaGUGGAUAUAUGCA | 0.1% |
| 6110 | 100 | CAAGCcGUGGAUAUAUGCA | 0.5% |
| 6111 | 100 | CAAGCUGUaGAUAUAUGCA | 2.8% |
| 6112 | 100 | CAAGCUGUGaAUAUAUGCA | 0.1% |
| 6113 | 100 | CAAGCUGUGGAaAUAUGCA | 0.2% |
| 6114 | 100 | CAAGCUGUGGAcAUAUGCA | 2.6% |
| 6115 | 100 | CAAGCcGUGGAUAUAUGuA | 0.1% |
| 6116 | 100 | CAAGCcGUGGgUAUAUGCA | 0.1% |
| 6117 | 100 | CAAGCaGUaGAUAUAUGCA | 0.2% |
| 6118 | 100 | CAAGCcGUGGAUAUuUGCA | 0.1% |
| 101 | 101 | AAGCUGUGGAUAUAUGCAA | 92.9% |
| 6119 | 101 | AAGCUGUGGAUAUAUGuAA | 0.1% |
| 6120 | 101 | AgGCUGUGGAUAUAUGCAA | 0.2% |
| 6121 | 101 | AAGCaGUGGAUAUAUGCAA | 0.1% |
| 6122 | 101 | AAGCcGUGGAUAUAUGCAA | 0.5% |
| 6123 | 101 | AAGCUGUaGAUAUAUGCAA | 2.8% |
| 6124 | 101 | AAGCUGUGaAUAUAUGCAA | 0.1% |
| 6125 | 101 | AAGCUGUGGAaAUAUGCAA | 0.2% |
| 6126 | 101 | AAGCUGUGGAcAUAUGCAA | 2.6% |
| 6127 | 101 | AAGCcGUGGAUAUAUGuAA | 0.1% |
| 6128 | 101 | AAGCcGUGGgUAUAUGCAA | 0.1% |
| 6129 | 101 | AAGCaGUaGAUAUAUGCAA | 0.2% |
| 6130 | 101 | AAGCcGUGGAUAUuUGCAA | 0.1% |
| 102 | 102 | AAAACAUGGAACCUUUGGC | 92.8% |
| 6131 | 102 | AAAACAUGGAACCUUUGCu | 1.1% |
| 6132 | 102 | AAAACAUGGAACuUUUGGC | 0.1% |
| 6133 | 102 | AAAACAUGGgACCUUUGGC | 1.1% |
| 6134 | 102 | AAAgCAUGGAACCUUUGGC | 0.2% |
| 6135 | 102 | gAAACAUGGAACCUUUGGC | 0.3% |
| 6136 | 102 | AAAACAUGGgACCUUUGGu | 0.1% |
| 6137 | 102 | AAAAaAUGGAACCUUUGGC | 0.4% |
| 6138 | 102 | AAAACAcGGAACCUUUGGC | 2.2% |
| 6139 | 102 | AAAACAUGGAACCUUnGGC | 0.1% |
| 6140 | 102 | AAAACAUGGAACCUUUaGC | 0.1% |
| 6141 | 102 | AAAACAcGGgACCUUUGGC | 0.1% |
| 6142 | 102 | AAAACAUGGAACCUUcGGu | 1.2% |
| 6143 | 102 | AAAgCAcGGAACCUUUGGC | 0.1% |
| 6144 | 102 | AAAACAcGGAACCUUcGGC | 0.1% |
| 103 | 103 | GUAAUGAAACGAAAACGGG | 92.6% |
| 6145 | 103 | GUAAUGAAACGgAAACGGG | 2.7% |
| 6146 | 103 | GUgAUGAAACGAAAACGGG | 3.3% |
| 6147 | 103 | GUgAUGAAACGgAAACGGG | 0.2% |
| 6148 | 103 | GUAAUGAAACGAAAAaGGG | 0.1% |
| 6149 | 103 | GUAAUGAAACGAAAACGaG | 0.3% |
| 6150 | 103 | GUAAUGAAACGAAAACGGa | 0.4% |
| 6151 | 103 | GUAAUGAAACGgAAACGaG | 0.1% |
| 6152 | 103 | GUAAUGAAACGgAAACGGa | 0.1% |
| 6153 | 103 | GUgAUGAAACGAAAACGGa | 0.1% |
| 104 | 104 | UAAUGAAACGAAAACGGGA | 92.6% |
| 6154 | 104 | UAAUGAAACGgAAACGGGA | 2.7% |
| 6155 | 104 | UgAUGAAACGAAAACGGGA | 3.3% |
| 6156 | 104 | UgAUGAAACGgAAACGGGA | 0.2% |
| 6157 | 104 | UAAUGAAACGAAAAaGGGA | 0.1% |
| 6158 | 104 | UAAUGAAACGAAAACGaGA | 0.3% |
| 6159 | 104 | UAAUGAAACGAAAACGGaA | 0.4% |
| 6160 | 104 | UAAUGAAACGgAAACGaGA | 0.1% |
| 6161 | 104 | UAAUGAAACGgAAACGGaA | 0.1% |
| 6162 | 104 | UgAUGAAACGAAAACGGaA | 0.1% |
| 105 | 105 | AAUGAAACGAAAACGGGAC | 92.6% |
| 6163 | 105 | AAUGAAACGgAAACGGGAC | 2.7% |
| 6164 | 105 | gAUGAAACGAAAACGGGAC | 3.3% |
| 6165 | 105 | gAUGAAACGgAAACGGGAC | 0.2% |
| 6166 | 105 | AAUGAAACGAAAAaGGGAC | 0.1% |
| 6167 | 105 | AAUGAAACGAAAACGaGAC | 0.3% |
| 6168 | 105 | AAUGAAACGAAAACGGaAC | 0.4% |
| 6169 | 105 | AAUGAAACGgAAACGaGAC | 0.1% |
| 6170 | 105 | AAUGAAACGgAAACGGaAC | 0.1% |
| 6171 | 105 | gAUGAAACGAAAACGGaAC | 0.1% |
| 106 | 106 | GAUGAAAUGGAUGAUGGCA | 92.3% |
| 6172 | 106 | GAUGAAAUGGAUGAUGGCg | 1.7% |
| 6173 | 106 | GAUGAAgUGGAUGAUGGCA | 0.1% |
| 6174 | 106 | GgUGAAAUGGAUGAUGGCA | 0.1% |
| 6175 | 106 | aAUGAAAUGGAUGAUGGCA | 3.4% |
| 6176 | 106 | aAUGAAAUGGAUGAUGGCg | 2.3% |
| 107 | 107 | AACAAGCUGUGGAUAUAUG | 91.3% |
| 6177 | 107 | AACAgGCUGUGGAUAUAUG | 0.2% |
| 6178 | 107 | AgCAAGCUGUGGAUAUAUG | 1.7% |
| 6179 | 107 | AACAAGCaGUGGAUAUAUG | 0.1% |
| 6180 | 107 | AACAAGCcGUGGAUAUAUG | 0.4% |
| 6181 | 107 | AACAAGCUGUaGAUAUAUG | 0.3% |
| 6182 | 107 | AACAAGCUGUGGAcAUAUG | 2.6% |
| 6183 | 107 | AgCAAGCcGUGGAUAUAUG | 0.2% |
| 6184 | 107 | AgCAAGCUGUaGAUAUAUG | 2.5% |
| 6185 | 107 | AgCAAGCUGUGaAUAUAUG | 0.1% |
| 6186 | 107 | AgCAAGCUGUGGAaAUAUG | 0.2% |
| 6187 | 107 | AgCAAGCcGUGGgUAUAUG | 0.1% |
| 6188 | 107 | AACAAGCaGUaGAUAUAUG | 0.2% |
| 6189 | 107 | AgCAAGCcGUGGAUAUuUG | 0.1% |
| 108 | 108 | GAACAAGCUGUGGAUAUAU | 91.3% |
| 6190 | 108 | GAACAgGCUGUGGAUAUAU | 0.2% |
| 6191 | 108 | GAgCAAGCUGUGGAUAUAU | 1.7% |
| 6192 | 108 | GAACAAGCaGUGGAUAUAU | 0.1% |
| 6193 | 108 | GAACAAGCcGUGGAUAUAU | 0.4% |
| 6194 | 108 | GAACAAGCUGUaGAUAUAU | 0.3% |
| 6195 | 108 | GAACAAGCUGUGGAcAUAU | 2.6% |
| 6196 | 108 | GAgCAAGCcGUGGAUAUAU | 0.2% |
| 6197 | 108 | GAgCAAGCUGUaGAUAUAU | 2.5% |
| 6198 | 108 | GAgCAAGCUGUGaAUAUAU | 0.1% |
| 6199 | 108 | GAgCAAGCUGUGGAaAUAU | 0.2% |
| 6200 | 108 | GAgCAAGCcGUGGgUAUAU | 0.1% |
| 6201 | 108 | GAACAAGCaGUaGAUAUAU | 0.2% |
| 6202 | 108 | GAgCAAGCcGUGGAUAUuU | 0.1% |
| 109 | 109 | ACAAGCUGUGGAUAUAUGC | 91.2% |
| 6203 | 109 | ACAAGCUGUGGAUAUAUGu | 0.1% |
| 6204 | 109 | ACAgGCUGUGGAUAUAUGC | 0.2% |
| 6205 | 109 | gCAAGCUGUGGAUAUAUGC | 1.7% |
| 6206 | 109 | ACAAGCaGUGGAUAUAUGC | 0.1% |
| 6207 | 109 | ACAAGCcGUGGAUAUAUGC | 0.3% |
| 6208 | 109 | ACAAGCUGUaGAUAUAUGC | 0.3% |
| 6209 | 109 | ACAAGCUGUGGAcAUAUGC | 2.6% |
| 6210 | 109 | ACAAGCcGUGGAUAUAUGu | 0.1% |
| 6211 | 109 | gCAAGCcGUGGAUAUAUGC | 0.2% |
| 6212 | 109 | gCAAGCUGUaGAUAUAUGC | 2.5% |
| 6213 | 109 | gCAAGCUGUGaAUAUAUGC | 0.1% |
| 6214 | 109 | gCAAGCUGUGGAaAUAUGC | 0.2% |
| 6215 | 109 | gCAAGCcGUGGgUAUAUGC | 0.1% |
| 6216 | 109 | ACAAGCaGUaGAUAUAUGC | 0.2% |
| 6217 | 109 | gCAAGCcGUGGAUAUuUGC | 0.1% |
| 110 | 110 | UGUACACUCCAGGUGGAGA | 90.0% |
| 6218 | 110 | UGUACACUCCAGGUGGgGA | 4.4% |
| 6219 | 110 | UGUACACaCCAGGUGGAGA | 0.1% |
| 6220 | 110 | UGUACACcCCAGGUGGAGA | 0.9% |
| 6221 | 110 | UGUACACgCCAGGUGGAGA | 0.1% |
| 6222 | 110 | UGUACACUCCAGGcGGAGA | 1.3% |
| 6223 | 110 | UGUACACUCCAGGUGGcGA | 0.2% |
| 6224 | 110 | UGUACACUCCcGGUGGAGA | 0.1% |
| 6225 | 110 | aGUACACUCCAGGUGGgGA | 0.1% |
| 6226 | 110 | UGUACACUCCAGGaGGgGA | 0.2% |
| 6227 | 110 | UGUACACUCCAGGcGGgGA | 0.1% |
| 6228 | 110 | UGUAuACUCCAGGaGGgGA | 0.2% |
| 6229 | 110 | UGUACACaCCAGGaGGgGA | 2.2% |
| 111 | 111 | AUGUACACUCCAGGUGGAG | 90.0% |
| 6230 | 111 | AUGUACACUCCAGGUGGgG | 4.4% |
| 6231 | 111 | AUGUACACaCCAGGUGGAG | 0.1% |
| 6232 | 111 | AUGUACACcCCAGGUGGAG | 0.9% |
| 6233 | 111 | AUGUACACgCCAGGUGGAG | 0.1% |
| 6234 | 111 | AUGUACACUCCAGGcGGAG | 1.3% |
| 6235 | 111 | AUGUACACUCCAGGUGGcG | 0.2% |
| 6236 | 111 | AUGUACACUCCcGGUGGAG | 0.1% |
| 6237 | 111 | AaGUACACUCCAGGUGGgG | 0.1% |
| 6238 | 111 | AUGUACACUCCAGGaGGgG | 0.2% |
| 6239 | 111 | AUGUACACUCCAGGcGGgG | 0.1% |
| 6240 | 111 | AUGUAuACUCCAGGaGGgG | 0.2% |
| 6241 | 111 | AUGUACACaCCAGGaGGgG | 2.2% |
| 6242 | 111 | AUGUACACgCCAGGaGGgG | 0.1% |

TABLE 20-2

Conserved and minor variant 19-mer sequences
from the Influenza A segment 2 (PB1) sequences
listed in Table 1-2. The conserved sequences
match at least 89% of the listed viral se-
quences, and the variants contain 3 or fewer
nucleotide changes from the reference sequence.

| | | | |
|---|---|---|---|
| Seq | Ref | | % |
| ID | ID | Match Seq | Total |

| | | | |
|---|---|---|---|
| 1183 | 1183 | AUGAUGAUGGGCAUGUUCA | 96.7% |
| 6243 | 1183 | AUGAUGAUGGGCAUGUUuA | 2.7% |
| 6244 | 1183 | AUGAUGAUGGGuAUGUUCA | 0.4% |
| 6245 | 1183 | AUGAUGAUGGGuAUGUUuA | 0.1% |
| 6246 | 1183 | AUGAUGAUGGGaAUGUUCA | 0.1% |
| 1184 | 1184 | UGAUGAUGGGCAUGUUCAA | 96.7% |
| 6247 | 1184 | UGAUGAUGGGCAUGUUuAA | 2.7% |
| 6248 | 1184 | UGAUGAUGGGuAUGUUCAA | 0.4% |
| 6249 | 1184 | UGAUGAUGGGuAUGUUuAA | 0.1% |
| 6250 | 1184 | UGAUGAUGGGaAUGUUCAA | 0.1% |
| 1185 | 1185 | AUCUGUUCCACCAUUGAAG | 91.1% |
| 6251 | 1185 | AUCUGUUuCACCAUUGAAG | 0.7% |
| 6252 | 1185 | AcCUGUUCCACCAUUGAAG | 6.9% |
| 6253 | 1185 | AUCUGcUCCACCAUUGAAG | 0.2% |
| 6254 | 1185 | AUCUGUUaCACCAUUGAAG | 0.1% |
| 6255 | 1185 | AUCUGUUCCACCAUUaAAG | 0.1% |
| 6256 | 1185 | AcCUGUUCuACCAUUGAAG | 0.1% |
| 6257 | 1185 | AcCUGcUCCACCAUUGAAG | 0.3% |
| 1186 | 1186 | UCUGUUCCACCAUUGAAGA | 91.1% |
| 6258 | 1186 | UCUGUUuCACCAUUGAAGA | 0.7% |
| 6259 | 1186 | cCUGUUCCACCAUUGAAGA | 6.9% |
| 6260 | 1186 | UCUGcUCCACCAUUGAAGA | 0.2% |
| 6261 | 1186 | UCUGUUaCACCAUUGAAGA | 0.1% |
| 6262 | 1186 | UCUGUUCCACCAUUaAAGA | 0.1% |
| 6263 | 1186 | cCUGUUCuACCAUUGAAGA | 0.1% |
| 6264 | 1186 | cCUGcUCCACCAUUGAAGA | 0.3% |
| 1187 | 1187 | GAUCUGUUCCACCAUUGAA | 90.9% |
| 6265 | 1187 | GAUCUGUUuCACCAUUGAA | 0.7% |
| 6266 | 1187 | aAUCUGUUCCACCAUUGAA | 0.1% |
| 6267 | 1187 | GAcCUGUUCCACCAUUGAA | 6.9% |
| 6268 | 1187 | GAUCUGCUCCACCAUUGAA | 0.2% |
| 6269 | 1187 | GAUCUGUUaCACCAUUGAA | 0.1% |
| 6270 | 1187 | GAUCUGUUCCACCAUUaAA | 0.1% |
| 6271 | 1187 | GAcCUGUUCuACCAUUGAA | 0.1% |
| 6272 | 1187 | GAcCUGcUCCACCAUUGAA | 0.3% |
| 1188 | 1188 | GAAGAUCUGUUCCACCAUU | 90.8% |
| 6273 | 1188 | GAAGAUCUGUUuCACCAUU | 0.7% |
| 6274 | 1188 | GAgGAUCUGUUCCACCAUU | 0.2% |
| 6275 | 1188 | GAAaAUCUGUUCCACCAUU | 0.1% |
| 6276 | 1188 | GAAGAcCUGUUCCACCAUU | 6.8% |
| 6277 | 1188 | GAAGAUCUGcUCCACCAUU | 0.2% |
| 6278 | 1188 | GAAGAUCUGUUaCACCAUU | 0.1% |
| 6279 | 1188 | GAAGAcCUGUUCuACCAUU | 0.1% |
| 6280 | 1188 | aAAGAcCUGUUCCACCAUU | 0.1% |
| 6281 | 1188 | GAAGAcCUGcUCCACCAUU | 0.2% |
| 1189 | 1189 | AAGAUCUGUUCCACCAUUG | 90.7% |
| 6282 | 1189 | AAGAUCUGUUuCACCAUUG | 0.7% |
| 6283 | 1189 | AgGAUCUGUUCCACCAUUG | 0.2% |
| 6284 | 1189 | AAaAUCUGUUCCACCAUUG | 0.1% |
| 6285 | 1189 | AAGAcCUGUUCCACCAUUG | 6.9% |
| 6286 | 1189 | AAGAUCUGcUCCACCAUUG | 0.2% |
| 6287 | 1189 | AAGAUCUGUUaCACCAUUG | 0.1% |
| 6288 | 1189 | AAGAUCUGUUCCACCAUUa | 0.1% |
| 6289 | 1189 | AAGAcCUGUUCuACCAUUG | 0.1% |
| 6290 | 1189 | AAGAcCUGcUCCAGCAUUG | 0.3% |
| 1190 | 1190 | UGAAGAUCUGUUCCACCAU | 90.7% |
| 6291 | 1190 | UGAAGAUCUGUUuCACCAU | 0.7% |
| 6292 | 1190 | UGAgGAUCUGUUCCACCAU | 0.2% |
| 6293 | 1190 | cGAAGAUCUGUUCCACCAU | 0.1% |
| 6294 | 1190 | UGAAaAUCUGUUCCACCAU | 0.1% |
| 6295 | 1190 | UGAAGAcCUGUUCCACCAU | 6.8% |
| 6296 | 1190 | UGAAGAUCUGcUCCACCAU | 0.2% |
| 6297 | 1190 | UGAAGAUCUGUUaCACCAU | 0.1% |
| 6298 | 1190 | UGAAGAcCUGUUCuACCAU | 0.1% |
| 6299 | 1190 | UaAAGAcCUGUUCCACCAU | 0.1% |
| 6300 | 1190 | UGAAGAcCUGcUCCACCAU | 0.2% |
| 1191 | 1191 | AGAUCUGUUCCACCAUUGA | 90.7% |
| 6301 | 1191 | AGAUCUGUUuCACCAUUGA | 0.7% |
| 6302 | 1191 | gGAUCUGUUCCACCAUUGA | 0.2% |
| 6303 | 1191 | AaAUCUGUUCCACCAUUGA | 0.1% |
| 6304 | 1191 | AGAcCUGUUCCACCAUUGA | 6.9% |
| 6305 | 1191 | AGAUCUGcUCCACCAUUGA | 0.2% |
| 6306 | 1191 | AGAUCUGUUaCACCAUUGA | 0.1% |
| 6307 | 1191 | AGAUCUGUUCCACCAUUaA | 0.1% |
| 6308 | 1191 | AGAcCUGUUCuACCAUUGA | 0.1% |
| 6309 | 1191 | AGAcCUGcUCCACCAUUGA | 0.3% |
| 1192 | 1192 | UGAUAAACAAUGACCUUGG | 90.5% |
| 6310 | 1192 | UGAUAAACAAUGAuCUUGG | 3.4% |
| 6311 | 1192 | UGAUAAAuAAUGACCUUGG | 0.6% |
| 6312 | 1192 | UGgUAAACAAUGACCUUGG | 0.3% |
| 6313 | 1192 | UGAUAAACAAcGACCUUGG | 3.9% |
| 6314 | 1192 | UGAUAAACAAUGACCUaGG | 1.2% |
| 1193 | 1193 | AUGAUAAACAAUGACCUUG | 90.5% |
| 6315 | 1193 | AUGAUAAACAAUGAuCUUG | 3.4% |
| 6316 | 1193 | AUGAUAAAuAAUGACCUUG | 0.6% |
| 6317 | 1193 | AUGgUAAACAAUGACCUUG | 0.3% |
| 6318 | 1193 | AUGAUAAACAAcGACCUUG | 3.9% |
| 6319 | 1193 | AUGAUAAACAAUGACCUaG | 1.2% |
| 1194 | 1194 | CCAUACAGCCAUGGAACAG | 89.2% |
| 6320 | 1194 | CCAUACAGCCAUGGAACgG | 0.1% |
| 6321 | 1194 | CCAUACAGCCAUGGgACAG | 1.3% |
| 6322 | 1194 | CCAUACAGuCAUGGAACAG | 0.2% |
| 6323 | 1194 | CCAUAuAGCCAUGGAACAG | 0.6% |
| 6324 | 1194 | CCuUACAGCCAUGGAACAG | 0.2% |
| 6325 | 1194 | CCcUACAGCCAUGGgACAG | 0.1% |
| 6326 | 1194 | CCuUACAGCCAUGGgACAG | 8.1% |
| 6327 | 1194 | CCuUACAGuCAUGGAACAG | 0.1% |
| 1195 | 1195 | CAUACAGCCAUGGAACAGG | 89.2% |
| 6328 | 1195 | CAUACAGCCAUGGAACgGG | 0.1% |
| 6329 | 1195 | CAUACAGCCAUGGgACAGG | 1.3% |
| 6330 | 1195 | CAUACAGuCAUGGAACAGG | 0.2% |
| 6331 | 1195 | CAUAuAGCCAUGGAACAGG | 0.6% |
| 6332 | 1195 | CuUACAGCCAUGGAACAGG | 0.2% |
| 6333 | 1195 | CcUACAGCCAUGGgACAGG | 0.1% |
| 6334 | 1195 | CuUACAGCCAUGGgACAGG | 8.1% |
| 6335 | 1195 | CuUACAGUCAUGGAACAGG | 0.1% |
| 1196 | 1196 | GAGGCCAUGGUCUCUAGGG | 89.1% |
| 6336 | 1196 | GAGGCCAUGGUGUCUgGGG | 0.1% |
| 6337 | 1196 | GAaGCCAUGGUGUCUAGGG | 0.3% |
| 6338 | 1196 | GAGGCaAUGGUGUCUAGGG | 0.1% |
| 6339 | 1196 | GAGGCCAUGaUGUCUAGGG | 0.2% |
| 6340 | 1196 | GAGGCCAUGGUaUCUAGGG | 0.5% |
| 6341 | 1196 | GAGGCCAUGGUGUCUAaGG | 0.1% |
| 6342 | 1196 | GAGGCCAUGGUGUCUAGaG | 0.2% |
| 6343 | 1196 | GAGGCCAUGGUGUCUcGGG | 0.4% |
| 6344 | 1196 | GAGGCCAUGGUuUCUAGGG | 0.2% |
| 6345 | 1196 | GAGGCCAUGGUaUCUAGGa | 0.1% |
| 6346 | 1196 | GAGGCCAUGGUUUCcAGGG | 0.1% |
| 1197 | 1197 | AGGCCAUGGUGUCUAGGGC | 89.1% |
| 6347 | 1197 | AGGCCAUGGUGUCUgGGGC | 0.1% |
| 6348 | 1197 | AaGCCAUGGUGUCUAGGGC | 0.3% |
| 6349 | 1197 | AGGCaAUGGUGUCUAGGGC | 0.1% |
| 6350 | 1197 | AGGCCAUGaUGUCUAGGGC | 0.2% |
| 6351 | 1197 | AGGCCAUGGUaUCUAGGGC | 0.5% |
| 6352 | 1197 | AGGCCAUGGUGUCUAaGGC | 0.1% |
| 6353 | 1197 | AGGCCAUGGUGUCUAGaGC | 0.2% |
| 6354 | 1197 | AGGCCAUGGUGUCUcGGGC | 0.4% |
| 6355 | 1197 | AGGCCAUGGUuUCUAGGGC | 0.2% |
| 6356 | 1197 | AGGCCAUGGUaUCUAGGaC | 0.1% |
| 6357 | 1197 | AGGCCAUGGUuUCcAGGGC | 0.1% |
| 1198 | 1198 | GGAGGCCAUGGUGUCUAGG | 89.0% |
| 6358 | 1198 | GGAGGCCAUGGUGUCUgGG | 0.1% |
| 6359 | 1198 | GGAGGCaAUGGUGUCUAGG | 0.1% |
| 6360 | 1198 | GGAGGCCAUGaUGUCUAGG | 0.2% |
| 6361 | 1198 | GGAGGCCAUGGUaUCUAGG | 0.6% |
| 6362 | 1198 | GGAGGCCAUGGUGUCUAaG | 0.1% |
| 6363 | 1198 | GGAGGCCAUGGUGUCUAGa | 0.2% |
| 6364 | 1198 | GGAGGCCAUGGUGUCUcGG | 0.4% |
| 6365 | 1198 | GGAGGCCAUGGUuUCUAGG | 0.2% |
| 6366 | 1198 | uGAGGCCAUGGUGUCUAGG | 0.1% |
| 6367 | 1198 | GGAGGCCAUGGUuUCcAGG | 0.1% |
| 6368 | 1198 | uGAaGCCAUGGUGUCUAGG | 0.3% |
| 1199 | 1199 | UGGAGGCCAUGGUGUCUAG | 88.9% |
| 6369 | 1199 | UGGAGGCCAUGGUGUCUgG | 0.1% |
| 6370 | 1199 | gGGAGGCCAUGGUGUCUAG | 0.3% |
| 6371 | 1199 | UGGAGGCaAUGGUGUCUAG | 0.1% |
| 6372 | 1199 | UGGAGCCCAUGaUGUCUAG | 0.2% |
| 6373 | 1199 | UGGAGGCCAUGGUaUCUAG | 0.6% |
| 6374 | 1199 | UGGAGGCCAUGGUGUCUAa | 0.1% |
| 6375 | 1199 | UGGAGGCCAUGGUGUCUcG | 0.4% |
| 6376 | 1199 | UGGAGGCCAUGGUuUCUAG | 0.2% |
| 6377 | 1199 | UuGAGGCCAUGGUGUCUAG | 0.1% |
| 6378 | 1199 | UGGAGGCCAUGGUuUCcAG | 0.1% |
| 6379 | 1199 | UuGAaGCCAUGGUGUCUAG | 0.3% |
| 6380 | 1199 | UGGAGGCuAUGGUaUCaAG | 0.1% |
| 6381 | 1199 | UGGAGGCuAUGGUuUCaAG | 0.1% |
| 6382 | 1199 | UGGAGGCuAUGGUuUCcAG | 0.7% |
| 1200 | 1200 | GAGAUCAUGAAGAUCUGUU | 88.8% |
| 6383 | 1200 | GAGAUCAUGAgGAUCUGUU | 0.2% |
| 6384 | 1200 | GAaAUCAUGAAGAUCUGUU | 0.5% |
| 6385 | 1200 | GAGAcCAUGAAGAUCUGUU | 0.1% |
| 6386 | 1200 | GAGAUCAcGAAGAUCUGUU | 0.1% |
| 6387 | 1200 | GAGAUCAUGAAaAUCUGUU | 0.1% |
| 6388 | 1200 | GAGAUCAUGAAGAcCUGUU | 6.9% |
| 6389 | 1200 | GAGAUCAUGAAGAUCUGcU | 0.2% |
| 6390 | 1200 | GAGAUCcUGAAGAUCUGUU | 0.1% |
| 6391 | 1200 | GAGAUCuUGAAGAUCUGUU | 2.0% |
| 6392 | 1200 | GAGAUCAUaAAGAcCUGUU | 0.1% |
| 6393 | 1200 | GAGAUCAUGAAGAcCUGcU | 0.2% |
| 1201 | 1201 | ACCAAGAAAAUGGUCACAC | 88.7% |
| 6394 | 1201 | ACCAAGAAAAUGGUCACgC | 0.3% |
| 6395 | 1201 | ACCAAGAAAAUGGUuACAC | 0.1% |
| 6396 | 1201 | ACCAAGAAgAUGGUCACAC | 0.3% |
| 6397 | 1201 | ACCAAGAgAAUGGUCACAC | 0.4% |
| 6398 | 1201 | ACCAAaAAAAUGGUCACAC | 0.7% |
| 6399 | 1201 | ACCAAGAAAAUGaUCACAC | 0.1% |
| 6400 | 1201 | ACCAAGAAAAUGGUCACcC | 0.1% |
| 6401 | 1201 | ACCAAGAAuAUGGUCACAC | 0.1% |
| 6402 | 1201 | ACCcAGAAAAUGGUCACAC | 0.1% |
| 6403 | 1201 | ACCAAaAAgAUGGUCACAC | 0.2% |
| 6404 | 1201 | ACCAAGAgAAUGGUCACuC | 0.1% |
| 6405 | 1201 | ACuAAGAAAAUGGUgACAC | 1.1% |
| 6406 | 1201 | ACuAAGAAAAUGGUgACgC | 0.1% |
| 6407 | 1201 | ACCAAaAAAAUGGUaACAC | 0.1% |
| 6408 | 1201 | ACCAAaAAAAUGGUgACAC | 0.1% |
| 6409 | 1201 | ACUAAaAAAAUGGUgACAC | 0.5% |
| 6410 | 1201 | ACuAAGAAAAUGaUaACAC | 0.2% |
| 1202 | 1202 | CCAAGAAAAUGGUCACACA | 88.7% |
| 6411 | 1202 | CCAAGAAAAUGGUCACgCA | 0.3% |
| 6412 | 1202 | CCAAGAAAAUGGUuACACA | 0.1% |
| 6413 | 1202 | CCAAGAAgAUGGUCACACA | 0.3% |
| 6414 | 1202 | CCAAGAgAAUGGUCACACA | 0.4% |
| 6415 | 1202 | CCAAaAAAAUGGUCACACA | 0.7% |
| 6416 | 1202 | CcAAGAAAAUGaUCACACA | 0.1% |
| 6417 | 1202 | CCAAGAAAAUGGUCACcCA | 0.1% |
| 6418 | 1202 | CCAACAAuAUGGUCACACA | 0.1% |
| 6419 | 1202 | CCcAGAAAAUGGUCACACA | 0.1% |
| 6420 | 1202 | CCAAaAAgAUGGUCACACA | 0.2% |
| 6421 | 1202 | CCAAGAgAAUGGUCACuCA | 0.1% |
| 6422 | 1202 | CuAAGAAAAUGGUgACACA | 1.1% |
| 6423 | 1202 | CuAAGAAAAUGGUgACgCA | 0.1% |
| 6424 | 1202 | CCAAaAAAAUGGUaACACA | 0.1% |
| 6425 | 1202 | CCAAaAAAAUGGUgACACA | 0.1% |
| 6426 | 1202 | CuAAaAAAAUGGUgACACA | 0.5% |
| 6427 | 1202 | CUAAGAAAAUGaUaACACA | 0.2% |
| 1203 | 1203 | UGACCAAGAAAAUGGUCAC | 88.7% |
| 6428 | 1203 | UGACCAAGAAAAUGGUuAC | 0.1% |
| 6429 | 1203 | UGACCAAGAAgAUGGUCAC | 0.3% |
| 6430 | 1203 | UGACCAAGAgAAUGGUCAC | 0.5% |
| 6431 | 1203 | UaACCAAGAAAAUGGUCAC | 0.3% |
| 6432 | 1203 | UGACCAAaAAAAUGGUCAC | 0.7% |
| 6433 | 1203 | UGACCAAGAAAAUGaUCAC | 0.1% |
| 6434 | 1203 | UGACCAAGAAuAUGGUCAC | 0.1% |
| 6435 | 1203 | UGACCcAGAAAAUGGUCAC | 0.1% |
| 6436 | 1203 | UuACCAAGAAAAUGGUCAC | 0.1% |
| 6437 | 1203 | UGACCAAaAAgAUGGUCAC | 0.2% |
| 6438 | 1203 | UGACuAAGAAAAUGGUgAC | 1.2% |
| 6439 | 1203 | UGACCAAaAAAAUGGUaAC | 0.1% |
| 6440 | 1203 | UGACuAAGAAAAUGaUaAC | 0.2% |
| 1204 | 1204 | AUGACcAAGAAAAUGGUCA | 88.7% |
| 6441 | 1204 | AUGACCAAGAAAAUGGUuA | 0.1% |
| 6442 | 1204 | AUGACCAAGAAgAUGGUCA | 0.3% |
| 6443 | 1204 | AUGACCAAGAgAAUGGUCA | 0.5% |
| 6444 | 1204 | AUaACCAAGAAAAUGGUCA | 0.3% |
| 6445 | 1204 | AUGACCAAaAAAAUGGUCA | 0.7% |
| 6446 | 1204 | AUGACCAAGAAAAUGaUCA | 0.1% |
| 6447 | 1204 | AUGACCAAGAAuAUGGUCA | 0.1% |
| 6448 | 1204 | AUGACCcAGAAAAUGGUCA | 0.1% |
| 6449 | 1204 | AUuACCAAGAAAAUGGUCA | 0.1% |
| 6450 | 1204 | AUGACCAAaAAgAUGGUCA | 0.2% |
| 6451 | 1204 | AUGACuAAGAAAAUGGUgA | 0.3% |
| 6452 | 1204 | gUGACuAAGAAAAUGGUgA | 0.9% |
| 6453 | 1204 | AUGACCAAaAAAAUGGUaA | 0.1% |
| 6454 | 1204 | AUGACuAAGAAAAUGaUaA | 0.2% |
| 1205 | 1205 | CAUGAAGAUCUGUUCCACC | 88.6% |
| 6455 | 1205 | CAUGAAGAUCUGUUuCACC | 0.7% |
| 6456 | 1205 | CAUGAgGAUCUGUUCCACC | 0.2% |
| 6457 | 1205 | CAcGAAGAUCUGUUCCACC | 0.1% |
| 6458 | 1205 | CAUGAAaAUCUGUUCCACC | 0.1% |
| 6459 | 1205 | CAUGAAGAcCUGUUCCACC | 6.8% |
| 6460 | 1205 | CAUGAAGAUCUGcUCCACC | 0.2% |
| 6461 | 1205 | CAUGAAGAUcUGUUaCACC | 0.1% |
| 6462 | 1205 | CcUGAAGAUCUGUUCCACC | 0.1% |
| 6463 | 1205 | CuUGAAGAUCUGUUCCACC | 2.0% |
| 6464 | 1205 | CAUGAAGAcCUGUUCuACC | 0.1% |
| 6465 | 1205 | CAUaAAGAcCUGUUCCACC | 0.1% |
| 6466 | 1205 | CAUGAAGAcCUGcUCCACC | 0.2% |
| 1206 | 1206 | AUGAAGAUCUGUUCCACCA | 88.6% |
| 6467 | 1206 | AUGAAGAUCUGUUuCACCA | 0.7% |
| 6468 | 1206 | AUGAgGAUCUGUUCCACCA | 0.2% |
| 6469 | 1206 | AcGAAGAUCUGUUCCACCA | 0.1% |
| 6470 | 1206 | AUGAAaAUCUGUUCCACCA | 0.1% |
| 6471 | 1206 | AUGAAGAcCUGUUCCACCA | 6.8% |
| 6472 | 1206 | AUGAAGAUCUGcUCCACCA | 0.2% |
| 6473 | 1206 | AUGAAGAUCUGUUaCACCA | 0.1% |
| 6474 | 1206 | cUGAAGAUCUGUUCCACCA | 0.1% |
| 6475 | 1206 | uUGAAGAUCUGUUCCACCA | 2.0% |
| 6476 | 1206 | AUGAAGAcCUGUUCuACCA | 0.1% |
| 6477 | 1206 | AUaAAGAcCUGUUCCACCA | 0.1% |
| 6478 | 1206 | AUGAAGAcCUGcUCCACCA | 0.2% |
| 1207 | 1207 | CAAGAAAAUGGUCACACAA | 88.6% |
| 6479 | 1207 | CAAGAAAAUGGUCACACAg | 0.1% |
| 6480 | 1207 | CAAGAAAAUGGUCACgCAA | 0.3% |
| 6481 | 1207 | CAAGAAAAUGGUuACACAA | 0.1% |
| 6482 | 1207 | CAAGAAgAUGGUCACACAA | 0.3% |
| 6483 | 1207 | CAAGAgAAUGGUCACACAA | 0.4% |
| 6484 | 1207 | CAAaAAAAUGGUCACACAA | 0.7% |
| 6485 | 1207 | CAAGAAAAUGaUCACACAA | 0.1% |
| 6486 | 1207 | CAAGAAAAUGGUCACcCAA | 0.1% |
| 6487 | 1207 | CAAGAAuAUGGUCACACAA | 0.1% |
| 6488 | 1207 | CcAGAAAAUGGUCACACAA | 0.1% |
| 6489 | 1207 | CAAaAAgAUGGUCACACAA | 0.2% |
| 6490 | 1207 | CAAGAgAAUGGUCACuCAA | 0.1% |
| 6491 | 1207 | uAAGAAAAUGGUgACACAA | 0.5% |
| 6492 | 1207 | uAAGAAAAUGGUgACACAg | 0.5% |
| 6493 | 1207 | uAAGAAAAUGGUgACgCAA | 0.1% |
| 6494 | 1207 | CAAaAAAAUGGUgACACAA | 0.1% |
| 6495 | 1207 | CAAaAAAAUGGUaACACAg | 0.1% |
| 6496 | 1207 | uAAaAAAAUGGUgACACAA | 0.5% |
| 1208 | 1208 | UCAUGAAGAUCUGUUCCAC | 88.5% |
| 6497 | 1208 | UCAUGAAGAUCUGUUUCAC | 0.7% |
| 6498 | 1208 | UCAUGAgGAUCUGUUCCAC | 0.2% |
| 6499 | 1208 | cCAUGAAGAUCUGUUCCAC | 0.1% |
| 6500 | 1208 | UCAcGAAGAUCUGUUCCAC | 0.1% |
| 6501 | 1208 | UCAUGAAaAUCUGUUCCAC | 0.1% |
| 6502 | 1208 | UCAUGAAGAcCUGUUCCAC | 6.8% |
| 6503 | 1208 | UCAUGAAGAUCUGcUCCAC | 0.2% |
| 6504 | 1208 | UCAUGAAGAUCUGUUaCAC | 0.1% |
| 6505 | 1208 | UCcUGAAGAUCUGUUCCAC | 0.1% |
| 6506 | 1208 | UCuUGAAGAUCUGUUCCAC | 2.0% |
| 6507 | 1208 | UCAUGAAGAcCUGUUCuAC | 0.1% |
| 6508 | 1208 | UCAUaAAGAcCUGUUCCAC | 0.1% |
| 6509 | 1208 | UCAUGAAGAcCUGcUCCAC | 0.2% |
| 1209 | 1209 | AUCAUGAAGAUCUGUUCCA | 88.5% |
| 6510 | 1209 | AUCAUGAAGAUCUGUUuCA | 0.7% |
| 6511 | 1209 | AUCAUGAgGAUCUGUUCCA | 0.2% |
| 6512 | 1209 | AcCAUGAAGAUCUGUUCCA | 0.1% |
| 6513 | 1209 | AUCAcGAAGAUCUGUUCCA | 0.1% |
| 6514 | 1209 | AUCAUGAAaAUCUGUUCCA | 0.1% |
| 6515 | 1209 | AUCAUGAAGAcCUGUUCCA | 6.8% |
| 6516 | 1209 | AUCAUGAAGAUCUGcUCCA | 0.2% |
| 6517 | 1209 | AUCAUGAAGAUCUGUUaCA | 0.1% |
| 6518 | 1209 | AUCcUGAAGAUCUGUUCCA | 0.1% |
| 6519 | 1209 | AUCuUGAAGAUCUGUUCCA | 2.0% |
| 6520 | 1209 | AUCAUGAAGAcCUGUUCuA | 0.1% |
| 6521 | 1209 | AUCAUaAAGAcCUGUUCCA | 0.1% |
| 6522 | 1209 | AUCAUGAAGAcCUGcUCCA | 0.2% |
| 1210 | 1210 | GAUGGGCAUGUUCAACAUG | 88.4% |
| 6523 | 1210 | GAUGGGCAUGUUCAAuAUG | 8.3% |
| 6524 | 1210 | GAUGGGCAUGUUuAACAUG | 0.7% |
| 6525 | 1210 | GAUGGGuAUGUUCAACAUG | 0.3% |
| 6526 | 1210 | GAUGGGCAUGUUuAAuAUG | 1.9% |
| 6527 | 1210 | GAUGGGuAUGUUCAAuAUG | 0.1% |
| 6528 | 1210 | GAUGGGuAUGUUuAAuAUG | 0.1% |
| 6529 | 1210 | GAUGGGaAUGUUCAACAUG | 0.1% |
| 1211 | 1211 | UGAUGGGCAUGUUCAACAU | 88.4% |
| 6530 | 1211 | UGAUGGGCAUGUUCAAuAU | 8.3% |
| 6531 | 1211 | UGAUGGGCAUGUUuAACAU | 0.7% |
| 6532 | 1211 | UGAUGGGuAUGUUCAACAU | 0.3% |
| 6533 | 1211 | UGAUGGGCAUGUUuAAuAU | 1.9% |
| 6534 | 1211 | UGAUGGGuAUGUUCAAuAU | 0.1% |
| 6535 | 1211 | UGAUGGGuAUGUUuAAuAU | 0.1% |
| 6536 | 1211 | UGAUGGGaAUGUUCAACAU | 0.1% |
| 1212 | 1212 | AUGAGGGAAUACAAGCAGG | 88.4% |
| 6537 | 1212 | AUGAGGGgAUACAAGCAGG | 1.5% |
| 6538 | 1212 | AcGAGGGAAUACAAGCAGG | 0.2% |
| 6539 | 1212 | AUaAGGGAAUACAAGCAGG | 0.1% |
| 6540 | 1212 | AUGAaGGAAUACAAGCAGG | 0.3% |
| 6541 | 1212 | AUGAGGGAAUACAAuCAGG | 0.2% |
| 6542 | 1212 | AUGAuGGAAUACAAGCAGG | 0.1% |
| 6543 | 1212 | AUGAGGGAAUuCAAGCcGG | 0.1% |
| 6544 | 1212 | AUGAaGGgAUuCAAGCAGG | 0.2% |
| 1213 | 1213 | ACAUGACCAAGAAAAUGGU | 88.4% |
| 6545 | 1213 | ACAUGACCAAGAAgAUGGU | 0.3% |
| 6546 | 1213 | ACAUGACCAAGAgAAUGGU | 0.5% |
| 6547 | 1213 | ACAUGACUAAGAAAAUGGU | 0.1% |
| 6548 | 1213 | AuAUGACCAAGAAAAUGGU | 0.4% |
| 6549 | 1213 | AuAUGACuAAGAAAAUGGU | 0.2% |
| 6550 | 1213 | AugUGACuAAGAAAAUGGU | 0.9% |
| 6551 | 1213 | ACAUaACCAAGAAAAUGGU | 0.3% |
| 6552 | 1213 | ACAUGACCAAaAAAAUGGU | 0.7% |
| 6553 | 1213 | ACAUGACCAAGAAAAUGaU | 0.1% |
| 6554 | 1213 | ACAUGACCAAGAAuAUGGU | 0.1% |
| 6555 | 1213 | ACAUGACCcAGAAAAUGGU | 0.1% |
| 6556 | 1213 | ACAUuACCAAGAAAAUGGU | 0.1% |
| 6557 | 1213 | ACAUGACCAAaAAgAUGGU | 0.2% |
| 6558 | 1213 | AuAUGACCAAaAAAAUGGU | 0.1% |
| 6559 | 1213 | AuAUGACuAAGAAAAUGaU | 0.2% |
| 1214 | 1214 | CAUGAGGGAAUACAAGCAG | 88.4% |
| 6560 | 1214 | CAUGAGGGgAUACAAGCAG | 1.5% |
| 6561 | 1214 | CAcGAGGGAAUACAAGCAG | 0.2% |
| 6562 | 1214 | CAUaAGGGAAUACAAGCAG | 0.1% |
| 6563 | 1214 | CAUGAaGGAAUACAAGCAG | 0.3% |
| 6564 | 1214 | CAUGAGGGAAUACAAuCAG | 0.2% |
| 6565 | 1214 | CAUGAuGCAAUACAAGCAG | 0.1% |
| 6566 | 1214 | CAUGAGGGAAUuCAAGCcG | 0.1% |
| 6567 | 1214 | CAUGAaGGgAUuCAAGCAG | 0.2% |
| 1215 | 1215 | GAUGAUGGGCAUGUUCAAC | 88.4% |
| 6568 | 1215 | GAUGAUGGGCAUGUUCAAu | 8.3% |
| 6569 | 1215 | GAUGAUGGGCAUGUUuAAC | 0.7% |
| 6570 | 1215 | GAUGAUGGGuAUGUUCAAC | 0.3% |
| 6571 | 1215 | GAUGAUGGGCAUGUUuAAu | 1.9% |
| 6572 | 1215 | GAUGAUGCGuAUGUUCAAu | 0.1% |
| 6573 | 1215 | GAUGAUGGGuAUGUUuAAu | 0.1% |
| 6574 | 1215 | GAUGAUGGGaAUGUUCAAC | 0.1% |
| 1216 | 1216 | AACAUGACCAAGAAAAUGG | 88.4% |
| 6575 | 1216 | AACAUGACCAAGAAgAUGG | 0.3% |
| 6576 | 1216 | AACAUGACCAAGAgAAUGG | 0.5% |
| 6577 | 1216 | AACAUGACuAAGAAAAUGG | 0.1% |
| 6578 | 1216 | AAuAUGACCAAGAAAAUGG | 0.4% |
| 6579 | 1216 | AAuAUGACuAAGAAAAUGG | 0.2% |
| 6580 | 1216 | AAugUGACuAAGAAAAUGG | 0.9% |
| 6581 | 1216 | AACAUaACCAAGAAAAUGG | 0.3% |
| 6582 | 1216 | AACAUGACCAAaAAAAUGG | 0.7% |
| 6583 | 1216 | AACAUGACCAAGAAAAUGa | 0.1% |
| 6584 | 1216 | AACAUGACCAAGAAuAUGG | 0.1% |
| 6585 | 1216 | AACAUGACCcAGAAAAUGG | 0.1% |
| 6586 | 1216 | AACAUuACCAAGAAAAUGG | 0.1% |
| 6587 | 1216 | AACAUGACCAAaAAgAUGG | 0.2% |
| 6588 | 1216 | AAuAUGACCAAaAAAAUGG | 0.1% |
| 6589 | 1216 | AAuAUGACuAAGAAAAUGa | 0.2% |
| 1217 | 1217 | AUGAUGGGCAUGUUCAACA | 88.4% |
| 6590 | 1217 | AUGAUGGGCAUGUUCAAuA | 8.3% |
| 6591 | 1217 | AUGAUGGGCAUGUUuAACA | 0.7% |
| 6592 | 1217 | AUGAUGGGuAUGUUCAACA | 0.3% |
| 6593 | 1217 | AUGAUGGGCAUGUUuAAuA | 1.9% |
| 6594 | 1217 | AUGAUGGGuAUGUUCAAuA | 0.1% |
| 6595 | 1217 | AUGAUGGGuAUGUUuAAuA | 0.1% |
| 6596 | 1217 | AUGAUGGGaAUGUUCAACA | 0.1% |
| 1218 | 1218 | CAUGACCAAGAAAAUGGUC | 88.3% |
| 6597 | 1218 | CAUGACCAAGAAAAUGGUu | 0.1% |
| 6598 | 1218 | CAUGACCAAGAAgAUGGUC | 0.3% |
| 6599 | 1218 | CAUGACCAAGAgAAUGGUC | 0.5% |
| 6600 | 1218 | uAUGACCAAGAAAAUGGUC | 0.4% |
| 6601 | 1218 | CAUaACCAAGAAAAUGGUC | 0.3% |
| 6602 | 1218 | CAUGACCAAaAAAAUGGUC | 0.6% |
| 6603 | 1218 | CAUGACCAAGAAAAUGaUC | 0.1% |
| 6604 | 1218 | CAUGACCAAGAAuAUGGUC | 0.1% |
| 6605 | 1218 | CAUGACCcAGAAAAUGGUC | 0.1% |
| 6606 | 1218 | CAUuACCAAGAAAAUGGUC | 0.1% |
| 6607 | 1218 | CAUGACCAAaAAgAUGGUC | 0.2% |
| 6608 | 1218 | CAUGACuAAGAAAAUGGUg | 0.1% |
| 6609 | 1218 | uAUGACCAAaAAAAUGGUC | 0.1% |
| 6610 | 1218 | uAUGACuAAGAAAAUGGUg | 0.2% |
| 6611 | 1218 | CAUGACCAAaAAAAUGGUa | 0.1% |
| 1219 | 1219 | CUCAUAGUGAAUGCACCAA | 88.3% |
| 6612 | 1219 | CUCAUAGUGAAUGCACCAg | 0.2% |
| 6613 | 1219 | CUCAUAGUGAAUGCAuCAA | 0.4% |
| 6614 | 1219 | CUuAUAGUGAAUGCACCAA | 0.1% |
| 6615 | 1219 | CUaAUAGUGAAUGCACCAA | 0.2% |
| 6616 | 1219 | CUCAUAaUGAAUGCACCAA | 0.1% |
| 6617 | 1219 | CUCAUAGUGAAUGCACaAA | 0.1% |
| 6618 | 1219 | CUCAUAGUGAAUGCACCuA | 0.2% |
| 6619 | 1219 | CUCAUAGUuAAUGCACCAA | 0.1% |
| 6620 | 1219 | CUCAUuGUGAAUGCACGAA | 0.1% |
| 6621 | 1219 | CUCAUCGUaAAUGGACCgA | 1.3% |
| 6622 | 1219 | CUgAUAGUGAAUGCgCCcA | 0.1% |
| 1220 | 1220 | GACCAAGAAAAUGGUCACA | 88.3% |
| 6623 | 1220 | GACCAAGAAAAUGGUCACg | 0.3% |
| 6624 | 1220 | GACCAAGAAAAUGGUuACA | 0.1% |
| 6625 | 1220 | GACCAAGAAgAUGGUCACA | 0.3% |
| 6626 | 1220 | GACCAAGAgAAUGGUCACA | 0.4% |
| 6627 | 1220 | aACCAAGAAAAUGGUCACA | 0.3% |
| 6628 | 1220 | GACCAAaAAAAUGGUCACA | 0.7% |
| 6629 | 1220 | GACCAAGAAAAUGaUCACA | 0.1% |
| 6630 | 1220 | GACCAAGAAAAUGGUCACc | 0.1% |
| 6631 | 1220 | GACCAAGAAUAUGGUCACA | 0.1% |
| 6632 | 1220 | GACCcAGAAAAUGGUCACA | 0.1% |
| 6633 | 1220 | uACCAAGAAAAUGGUCACA | 0.1% |
| 6634 | 1220 | GACCAAaAAgAUGGUCACA | 0.2% |
| 6635 | 1220 | GACGAAGAgAAUGGUCACu | 0.1% |
| 6636 | 1220 | GACuAAGAAAAUGGUgACA | 1.1% |
| 6637 | 1220 | GACuAAGAAAAUGGUgACg | 0.1% |
| 6638 | 1220 | GACCAAaAAAAUGGUaACA | 0.1% |
| 6639 | 1220 | GACuAAGAAAAUGaUaACA | 0.2% |
| 1221 | 1221 | UCAUAGUGAAUGCACCAAA | 88.3% |
| 6640 | 1221 | UCAUAGUGAAUGCACCAgA | 0.2% |
| 6641 | 1221 | UCAUAGUGAAUGCAuCAAA | 0.4% |
| 6642 | 1221 | UuAUAGUGAAUGCACCAAA | 0.1% |
| 6643 | 1221 | UaAUAGUGAAUGCACCAAA | 0.2% |
| 6644 | 1221 | UCAUAaUGAAUGCACCAAA | 0.1% |
| 6645 | 1221 | UCAUAGUGAAUGCACaAAA | 0.1% |
| 6646 | 1221 | UCAUAGUGAAUGCACCuAA | 0.1% |
| 6647 | 1221 | UCAUAGUuAAUGCACCAAA | 0.1% |
| 6648 | 1221 | UCAUuGUGAAUGCACCAAA | 0.1% |
| 6649 | 1221 | UCAUAGUGAAUGCACCuAg | 0.1% |
| 6650 | 1221 | UCAUcGUaAAUGCACCgAA | 1.3% |
| 6651 | 1221 | UgAUAGUGAAUGCgCCcAA | 0.1% |
| 1222 | 1222 | AUGGGCAUGUUCAACAUGC | 88.2% |
| 6652 | 1222 | AUGGGCAUGUUCAACAUGu | 0.2% |
| 6653 | 1222 | AUGGGCAUGUUuAACAUGC | 0.7% |
| 6654 | 1222 | AUGGGuAUGUUCAACAUGC | 0.3% |
| 6655 | 1222 | AUGGGcAUGUUCAAuAUGu | 8.3% |
| 6656 | 1222 | AUGGGCAUGUUuAAuAUGC | 1.9% |
| 6657 | 1222 | AUGGGuAUGUUCAAuAUGu | 0.1% |
| 6658 | 1222 | AUGGGaAUGUUCAACAUGC | 0.1% |
| 1223 | 1223 | ACAACAUGACCAAGAAAAU | 88.2% |
| 6659 | 1223 | ACAACAUGACCAAGAAgAU | 0.3% |
| 6660 | 1223 | ACAACAUGACCAAGAgAAU | 0.5% |
| 6661 | 1223 | ACAACAUGACuAAGAAAAU | 0.1% |
| 6662 | 1223 | ACAAuAUGACCAAGAAAAU | 0.4% |
| 6663 | 1223 | AuAACAUGACCAAGAAAAU | 0.3% |
| 6664 | 1223 | ACAAuAUGACuAAGAAAAU | 0.4% |
| 6665 | 1223 | ACAAugUGACuAAGAAAAU | 0.9% |
| 6666 | 1223 | ACAACAUaACCAAGAAAAU | 0.3% |
| 6667 | 1223 | ACAAGAUGACCAAaAAAAU | 0.7% |
| 6668 | 1223 | ACAACAUGACCAAGAAuAU | 0.1% |
| 6669 | 1223 | ACAACAUGACCcAGAAAAU | 0.1% |
| 6670 | 1223 | ACAACAUuACCAAGAAAAU | 0.1% |
| 6671 | 1223 | ACAACAUGACCAAaAAgAU | 0.2% |
| 6672 | 1223 | ACAAuAUGACCAAaAAAAU | 0.1% |
| 1224 | 1224 | AUAGUGAAUGCACCAAAUC | 88.2% |
| 6673 | 1224 | AUAGUGAAUGGACCAgAUC | 0.2% |
| 6674 | 1224 | AUAGUGAAUGCAuCAAAUC | 0.4% |
| 6675 | 1224 | AUAaUGAAUGCACCAAAUC | 0.1% |
| 6676 | 1224 | AUAGUGAAUGCACaAAAUC | 0.1% |
| 6677 | 1224 | AUAGUGAAUGCACCAAAcC | 0.4% |
| 6678 | 1224 | AUAGUGAAUGCACCuAAUC | 0.1% |
| 6679 | 1224 | AUAGUuAAUGCACCAAAUC | 0.1% |
| 6680 | 1224 | AUuGUGAAUGCACCAAAUC | 0.1% |
| 6681 | 1224 | AUAGUGAAUGCACCuAgUC | 0.1% |
| 6682 | 1224 | AUuGUGAAUGCACCcAAUC | 1.1% |
| 6683 | 1224 | AUcGUaAAUGCACCgAAUC | 1.3% |
| 1225 | 1225 | UAGUGAAUGCACCAAAUCA | 88.2% |
| 6684 | 1225 | UAGUGAAUGCACCAgAUCA | 0.2% |
| 6685 | 1225 | UAGUGAAUGCAuCAAAUCA | 0.4% |
| 6686 | 1225 | UAaUGAAUGCACCAAAUCA | 0.1% |
| 6687 | 1225 | UAGUGAAUGCACaAAAUCA | 0.1% |
| 6688 | 1225 | UAGUGAAUGCACCAAAcCA | 0.4% |
| 6689 | 1225 | UAGUGAAUGCACCuAAUCA | 0.1% |
| 6690 | 1225 | UAGUuAAUGCACCAAAUCA | 0.1% |
| 6691 | 1225 | UuGUGAAUGCACCAAAUCA | 0.1% |
| 6692 | 1225 | UAGUGAAUGCACCuAgUCA | 0.1% |
| 6693 | 1225 | UuGUGAAUGCACCcAAUCA | 1.1% |
| 6694 | 1225 | UcGUaAAUGCACCgAAUCA | 1.3% |
| 1226 | 1226 | GCCAUGGUGUCUAGGGCCC | 88.2% |
| 6695 | 1226 | GCCAUGGUGUCUAGGGCuC | 1.3% |
| 6696 | 1226 | GCCAUGGUGUCUgGGGCCC | 0.1% |
| 6697 | 1226 | GCaAUGGUGUCUAGGGCCC | 0.1% |
| 6698 | 1226 | GCCAUGaUGUUCAGGGCCC | 0.2% |
| 6699 | 1226 | GCCAUGGUaUCUAGGGCCC | 0.4% |
| 6700 | 1226 | GCCAUGGUGUCUAaGGCCC | 0.1% |
| 6701 | 1226 | GCCAUGGUGUCUAGaGCCC | 0.2% |
| 6702 | 1226 | GCCAUGGUGUCUcGGGCCC | 0.3% |
| 6703 | 1226 | GCCAUGGUuUCUAGGGCCC | 0.2% |
| 6704 | 1226 | GCCAUGGUGUCUcGGGCuC | 0.1% |
| 6705 | 1226 | GCCAUGGUaUCUAGGaCCC | 0.1% |
| 6706 | 1226 | GCCAUGGUaUCUAGGGCCa | 0.1% |
| 6707 | 1226 | GCCAUGGUuUCcAGGGCCC | 0.1% |
| 1227 | 1227 | GACAACAUGACCAAGAAAA | 88.2% |
| 6708 | 1227 | GACAACAUGACCAAGAAgA | 0.3% |
| 6709 | 1227 | GACAACAUGACCAAGAgAA | 0.5% |
| 6710 | 1227 | GACAACAUGACuAAGAAAA | 0.1% |
| 6711 | 1227 | GACAAuAUGACCAAGAAAA | 0.4% |
| 6712 | 1227 | GAuAACAUGACCAAGAAAA | 0.3% |
| 6713 | 1227 | GACAAuAUGACuAAGAAAA | 0.4% |
| 6714 | 1227 | GACAAugUGACuAAGAAAA | 0.9% |
| 6715 | 1227 | GACAACAUaACCAAGAAAA | 0.3% |
| 6716 | 1227 | GACAAcAUGACCAAaAAAA | 0.7% |
| 6717 | 1227 | GACAACAUGACCAAGAAuA | 0.1% |
| 6718 | 1227 | GACAACAUGACCcAGAAAA | 0.1% |
| 6719 | 1227 | GACAACAUuACCAAGAAAA | 0.1% |
| 6720 | 1227 | GACAACAUGACCAAaAAgA | 0.2% |
| 6721 | 1227 | GACAAuAUGACCAAaAAAA | 0.1% |
| 1228 | 1228 | UGGGCAUGUUCAACAUGCU | 88.2% |
| 6722 | 1228 | UGGGCAUGUUCAACAUGuU | 0.2% |
| 6723 | 1228 | UGGGCAUGUUuAACAUGCU | 0.7% |
| 6724 | 1228 | UGGGuAUGUUCAACAUGCU | 0.3% |
| 6725 | 1228 | UGGGCAUGUUCAAuAUGuU | 8.3% |
| 6726 | 1228 | UGGGCAUGUUuAAuAUGCU | 1.9% |
| 6727 | 1228 | UGGGuAUGUUCAAuAUGuU | 0.1% |
| 6728 | 1228 | UGGGaAUGUUCAACAUGCU | 0.1% |
| 1229 | 1229 | CCAUGGUGUCUAGGGCCGG | 88.2% |
| 6729 | 1229 | CCAUGGUGUCUAGGGCuCG | 1.3% |
| 6730 | 1229 | CCAUGGUGUCUgGGGCCCG | 0.1% |
| 6731 | 1229 | CaAUGGUGUCUAGGGCCGG | 0.1% |
| 6732 | 1229 | CCAUGaUGUCUAGGGCCCG | 0.2% |
| 6733 | 1229 | CCAUGGUaUCUAGGGCCCG | 0.4% |
| 6734 | 1229 | CCAUGGUGUCUAaGGCCCG | 0.1% |
| 6735 | 1229 | CCAUGGUGUCUAGaGCCCG | 0.2% |
| 6736 | 1229 | CCAUGGUGUCUcGGGCCCG | 0.3% |
| 6737 | 1229 | CCAUGGUuUCUAGGGCCCG | 0.2% |
| 6738 | 1229 | CCAUGGUGUCUcGGGCuCG | 0.1% |
| 6739 | 1229 | CCAUGGUaUCUAGGaCCCG | 0.1% |
| 6740 | 1229 | CCAUGGUaUCUAGGGCCaG | 0.1% |
| 6741 | 1229 | CCAUGGUuUCcAGGGCCCG | 0.1% |
| 1230 | 1230 | CAACAUGACCAAGAAAAUG | 88.2% |
| 6742 | 1230 | CAACAUGACCAAGAAgAUG | 0.3% |
| 6743 | 1230 | CAACAUGACCAAGAgAAUG | 0.5% |
| 6744 | 1230 | CAACAUGACuAAGAAAAUG | 0.1% |
| 6745 | 1230 | CAAuAUGACCAAGAAAAUG | 0.4% |
| 6746 | 1230 | uAACAUGACCAAGAAAAUG | 0.3% |
| 6747 | 1230 | CAAuAUGACuAAGAAAAUG | 0.4% |
| 6748 | 1230 | CAAugUGACuAAGAAAAUG | 0.9% |
| 6749 | 1230 | CAACAUaACCAAGAAAAUG | 0.3% |
| 6750 | 1230 | CAACAUGACCAAaAAAAUG | 0.7% |
| 6751 | 1230 | CAACAUGACCAAGAAuAUG | 0.1% |
| 6752 | 1230 | CAACAUGACCcAGAAAAUG | 0.1% |
| 6753 | 1230 | CAACAUuACCAAGAAAAUG | 0.1% |
| 6754 | 1230 | CAACAUGACCAAaAAgAUG | 0.2% |
| 6755 | 1230 | CAAuAUGACCAAaAAAAUG | 0.1% |
| 6756 | 1230 | CAACAUGAgCAAGAAAAaG | 0.1% |
| 1231 | 1231 | UGAAUGCACCAAAUCAUGA | 88.1% |
| 6757 | 1231 | UGAAUGCACCAgAUCAUGA | 0.2% |
| 6758 | 1231 | UGAAUGCAuCAAAUCAUGA | 0.4% |
| 6759 | 1231 | UGAAUGCACaAAAUCAUGA | 0.1% |
| 6760 | 1231 | UGAAUGCACCAAACcAUGA | 0.4% |
| 6761 | 1231 | UGAAUGCACCAAAUCAcGA | 0.2% |
| 6762 | 1231 | UGAAUGCACCAAAUCAUaA | 0.1% |
| 6763 | 1231 | UGAAUGCACCcAAUCAUGA | 0.5% |
| 6764 | 1231 | UGAAUGCACCuAAUCAUGA | 0.1% |
| 6765 | 1231 | UuAAUGCACCAAAUCAUGA | 0.1% |
| 6766 | 1231 | UaAAUGCACCgAAUCAUGA | 1.3% |
| 6767 | 1231 | UGAAUGCACCuAgUCAUGA | 0.1% |
| 6768 | 1231 | UaAAUGCgCCgAAUCAUGA | 0.1% |
| 6769 | 1231 | UaAAUGCACCcAAUCAUGA | 0.1% |
| 6770 | 1231 | UGAAUGCACCcAAUCAUGc | 0.5% |
| 6771 | 1231 | UaAAcGcACCgAAUCAUGA | 0.2% |
| 1232 | 1232 | GUGAAUGCACCAAAUCAUG | 88.0% |
| 6772 | 1232 | GUGAAUGCACCAgAUCAUG | 0.2% |
| 6773 | 1232 | GUGAAUGCAuCAAAUCAUG | 0.4% |
| 6774 | 1232 | aUGAAUGCACCAAAUCAUG | 0.1% |
| 6775 | 1232 | GUGAAUGCACaAAAUCAUG | 0.1% |
| 6776 | 1232 | GUGAAUGCACCAAAcCAUG | 0.4% |
| 6777 | 1232 | GUGAAUGCACCAAAUCAcG | 0.2% |
| 6778 | 1232 | GUGAAUGCACCAAAUCAUa | 0.1% |
| 6779 | 1232 | GUGAAUGCACCcAAUCAUG | 1.1% |
| 6780 | 1232 | GUGAAUGCACCuAAUCAUG | 0.1% |
| 6781 | 1232 | GUuAAUGCACCAAAUCAUG | 0.1% |
| 6782 | 1232 | GUaAAUGCACCgAAUCAUG | 1.3% |
| 6783 | 1232 | GUGAAUCCACCuAgUCAUG | 0.1% |
| 6784 | 1232 | GUaAAUGCgCCgAAUCAUG | 0.1% |
| 6785 | 1232 | GUaAAUGCACCcAAUCAUG | 0.1% |
| 6786 | 1232 | GUGAAUGCACCcAAcCAUG | 0.5% |
| 6787 | 1232 | GUaAAcGCACCgAAUCAUG | 0.2% |
| 6788 | 1232 | GUGAAUGCACCcAAcuAUG | 6.2% |
| 1233 | 1233 | AGAUCAUGAAGAUCUGUUC | 88.0% |
| 6789 | 1233 | AGAUCAUGAAGAUCUGUUu | 0.7% |
| 6790 | 1233 | AGAUCAUGAgGAUCUGUUC | 0.2% |
| 6791 | 1233 | AaAUCAUGAAGAUCUGUUC | 0.5% |
| 6792 | 1233 | AGAcCAUGAAGAUCUGUUC | 0.1% |
| 6793 | 1233 | AGAUCAcGAAGAUCUGUUC | 0.1% |
| 6794 | 1233 | AGAUCAUGAAaAUCUGUUC | 0.1% |
| 6795 | 1233 | AGAUCAUGAAGAcCUGUUC | 6.9% |
| 6796 | 1233 | AGAUCAUGAAGAUCUGcUC | 0.2% |
| 6797 | 1233 | AGAUCAUGAAGAUCUGUUa | 0.1% |
| 6798 | 1233 | AGAUCcUGAAGAUCUGUUC | 0.1% |
| 6799 | 1233 | AGAUCuUGAAGAUCUGUUC | 2.0% |
| 6800 | 1233 | AGAUCAUaAAGAcCUGUUC | 0.1% |
| 6801 | 1233 | AGAUCAUGAAGAcCUGcUC | 0.2% |
| 1234 | 1234 | UCAUGAGGGAAUACAAGCA | 88.0% |
| 6802 | 1234 | UCAUGAGGGgAUACAAGGA | 1.5% |
| 6803 | 1234 | cCAUGAGGGAAUACAAGCA | 0.4% |
| 6804 | 1234 | UCAcGAGGGAAUACAAGCA | 0.2% |
| 6805 | 1234 | UCAUaAGGGAAUACAAGCA | 0.1% |
| 6806 | 1234 | UCAUGAaGGAAUACAAGCA | 0.3% |
| 6807 | 1234 | UCAUGAGGGAAUACAAuCA | 0.2% |
| 6808 | 1234 | UCAUGAuGGAAUACAAGCA | 0.1% |
| 6809 | 1234 | UCAUGAGGGAAUuCAAGCc | 0.1% |
| 6810 | 1234 | UCAUGAaGGgAUuCAAGCA | 0.2% |
| 1235 | 1235 | CAGCGCAAAAUGCCAUAAG | 88.0% |
| 6811 | 1235 | CAGCGCAAAAUGCuAUAAG | 0.4% |
| 6812 | 1235 | CAGCGCAgAAUGCCAUAAG | 0.2% |
| 6813 | 1235 | CAGuGCAAAAUGCCAUAAG | 0.6% |
| 6814 | 1235 | CgGCGCAAAAUGCCAUAAG | 0.1% |
| 6815 | 1235 | CAGuGCAAAAUGCuAUAAG | 1.6% |
| 6816 | 1235 | CAaCGCAAAAUGCCAUAAG | 0.1% |
| 6817 | 1235 | CAGCaCAAAAUGCCAUAAG | 0.1% |
| 6818 | 1235 | CAGCGCAAAAUGCaAUAAG | 0.2% |
| 6819 | 1235 | CAGCuCAAAAUGCCAUAAG | 0.1% |
| 6820 | 1235 | GAuCGCAAAAUGCCAUAAG | 0.1% |
| 6821 | 1235 | CAGCaCAAAAUGCuAUAAG | 8.1% |
| 6822 | 1235 | CAGCaCAAAAUGuuAUAAG | 0.1% |
| 6823 | 1235 | CAGCaCAAAgUGCuAUAAG | 0.1% |
| 6824 | 1235 | CAGCaCAAAAUGCaAUAAG | 0.1% |
| 1236 | 1236 | GAAUUCUUGAGGAUGAACA | 88.0% |
| 6825 | 1236 | GAAUUCUUGAGGAUGAgCA | 0.1% |
| 6826 | 1236 | GAAUUCUUGAGGAUGgACA | 0.1% |
| 6827 | 1236 | GAAUaCUUGAGGAUGAACA | 0.2% |
| 6828 | 1236 | GAAUcCUUGAGGAUGAACA | 0.4% |
| 6829 | 1236 | GAAUUaUUGAGGAUGAACA | 0.1% |
| 6830 | 1236 | GAAUUCUcGAGGAUGAACA | 0.1% |
| 6831 | 1236 | GAAUUCUUGAaGAUGAACA | 2.1% |
| 6832 | 1236 | GAAUUCUUGAGGAcGAACA | 0.1% |
| 6833 | 1236 | GAAUUCUUGAGGAUcAACA | 0.3% |
| 6834 | 1236 | GAAUaCUUGAGGAUGAgCA | 0.5% |
| 6835 | 1236 | GgAUaCUUGAGGAUGAgCA | 4.3% |
| 6836 | 1236 | GAAUaCUUGAaGAUGAACA | 1.0% |
| 6837 | 1236 | GAgUaCUUGAaGAUGAACA | 0.2% |
| 1237 | 1237 | GAUCAUGAAGAUCUGUUCC | 88.0% |
| 6838 | 1237 | GAUCAUGAAGAUCUGUUuC | 0.7% |
| 6839 | 1237 | GAUCAUGAgGAUCUGUUCC | 0.2% |
| 6840 | 1237 | aAUCAUGAAGAUCUGUUCC | 0.5% |
| 6841 | 1237 | GAcCAUGAAGAUCUGUUCC | 0.1% |
| 6842 | 1237 | GAUCAcGAAGAUCUGUUCC | 0.1% |
| 6843 | 1237 | GAUCAUGAAaAUCUGUUCG | 0.1% |
| 6844 | 1237 | GAUCAUGAAGAcCUGUUCC | 6.8% |
| 6845 | 1237 | GAUCAUGAAGAUCUGcUCC | 0.2% |
| 6846 | 1237 | GAUCAUGAAGAUCUGUUaC | 0.1% |
| 6847 | 1237 | GAUCcUGAAGAUCUGUUCC | 0.1% |
| 6848 | 1237 | GAUCuUGAAGAUCUGUUCC | 2.0% |
| 6849 | 1237 | GAUCAUGAAGAcCUGUUCu | 0.1% |
| 6850 | 1237 | GAUCAUaAAGAcCUGUUCC | 0.1% |
| 6851 | 1237 | GAUCAUGAAGAcCUGCUCC | 0.2% |
| 1238 | 1238 | AGUGAAUGCACCAAAUCAU | 88.0% |
| 6852 | 1238 | AGUGAAUGCACCAgAUCAU | 0.2% |
| 6853 | 1238 | AGUGAAUGCAuCAAAUCAU | 0.4% |
| 6854 | 1238 | AaUGAAUGCACCAAAUCAU | 0.1% |
| 6855 | 1238 | AGUGAAUGCACaAAAUCAU | 0.1% |
| 6856 | 1238 | AGUGAAUGCACCAAAcCAU | 0.4% |
| 6857 | 1238 | AGUGAAUGCACCAAAUCAc | 0.2% |
| 6858 | 1238 | AGUGAAUGCACCuAAUCAU | 0.1% |
| 6859 | 1238 | AGUuAAUGCACCAAAUCAU | 0.1% |
| 6860 | 1238 | uGUGAAUGCACCAAAUCAU | 0.1% |
| 6861 | 1238 | AGUGAAUGCACCuAgUCAU | 0.1% |
| 6862 | 1238 | uGUGAAUGCACCcAAUCAU | 1.1% |
| 6863 | 1238 | cGUaAAUGCACCgAAUCAU | 1.3% |
| 1239 | 1239 | GGAAUUCUUGAGGAUGAAC | 88.0% |
| 6864 | 1239 | GGAAUUCUUGAGGAUGAgC | 0.1% |
| 6865 | 1239 | GGAAUUCUUGAGGAUGgAC | 0.1% |
| 6866 | 1239 | GGAAUaCUUGAGGAUGAAC | 0.2% |
| 6867 | 1239 | GGAAUcCUUGAGGAUGAAC | 0.4% |
| 6868 | 1239 | GGAAUUaUUGAGGAUGAAC | 0.1% |
| 6869 | 1239 | GGAAUUCUcGAGGAUGAAC | 0.1% |
| 6870 | 1239 | GGAAUUCUUGAaGAUGAAC | 2.1% |
| 6871 | 1239 | GGAAUUCUUGAGGAcGAAC | 0.1% |
| 6872 | 1239 | GGAAUUCUUGAGGAUcAAC | 0.3% |
| 6873 | 1239 | GGAAUaCUUGAGGAUGAgC | 0.5% |
| 6874 | 1239 | GGgAUaCUUGAGGAUGAgC | 4.3% |
| 6875 | 1239 | GGAAUaCUUGAaGAUGAAC | 1.0% |
| 6876 | 1239 | GGAgUaCUUGAaGAUGAAC | 0.2% |

TABLE 20-3

Conserved and minor variant 19-mer sequences
from the Influenza A segment 3 (PA) sequences
listed in Table 1-3. The conserved sequences
match at least 89% of the listed viral se-
quences, and the variants contain 3 or fewer
nucleotide changes from the reference sequence.

| | | | |
|---|---|---|---|
| Seq | Ref | | % |
| ID | ID | Match Seq | Total |

| | | | |
|---|---|---|---|
| 2390 | 2390 | UUAGAGCCUAUGUGGAUGG | 98.9% |
| 6877 | 2390 | UUAaAGCCUAUGUGGAUGG | 0.1% |
| 6878 | 2390 | UUAGAaCCUAUGUGGAUGG | 0.6% |
| 6879 | 2390 | UUAGAGCCUAUGUaGAUGG | 0.2% |
| 6890 | 2390 | UUAGAGCCUAUGUGGAUaG | 0.1% |
| 2391 | 2391 | UUUAGAGCCUAUGUGGAUG | 98.9% |
| 6881 | 2391 | UUUAaAGCCUAUGUGGAUG | 0.1% |
| 6882 | 2391 | UUUAGAaCCUAUGUGGAUG | 0.6% |
| 6883 | 2391 | UUUAGAGCCUAUGUaGAUG | 0.2% |
| 6884 | 2391 | UUUAGAGCCUAUGUGGAUa | 0.1% |
| 2392 | 2392 | AGCAAUUGAGGAGUGCCUG | 98.7% |
| 6885 | 2392 | AGCAgUUGAGGAGUGCCUG | 0.1% |
| 6886 | 2392 | AGCAAUUGAGGAaUGCCUG | 1.0% |
| 6887 | 2392 | AGCAAUUGAGGAGUGCCUa | 0.2% |
| 2393 | 2393 | UUGAGGAGUGCCUGAUUAA | 98.7% |
| 6888 | 2393 | UUGAGGAGUGCCUGgUUAA | 0.1% |
| 6889 | 2393 | UUGAGGAaUGCCUGAUUAA | 1.0% |
| 6890 | 2393 | UUGAGGAGUGCCUaAUUAA | 0.2% |
| 2394 | 2394 | GCAAUUGAGGAGUGCCUGA | 98.6% |
| 6891 | 2394 | GCAAUUGAGGAGUGCCUGg | 0.1% |
| 6892 | 2394 | GCAgUUGAGGAGUGCCUGA | 0.1% |
| 6893 | 2394 | GCAAUUGAGGAaUGCCUGA | 1.0% |
| 6894 | 2394 | GCAAUUGAGGAGUGCCUaA | 0.2% |
| 2395 | 2395 | AUUGAGGAGUGCCUGAUUA | 98.6% |
| 6895 | 2395 | AUUGAGGAGUGCCUGgUUA | 0.1% |
| 6896 | 2395 | gUUGAGGAGUGCCUGAUUA | 0.1% |
| 6897 | 2395 | AUUGAGGAaUGCCUGAUUA | 1.0% |
| 6898 | 2395 | AUUGAGGAGUGCCUaAUUA | 0.2% |
| 2396 | 2396 | CAAUUGAGGAGUGCCUGAU | 98.6% |
| 6899 | 2396 | CAAUUGAGGAGUGCCUGgU | 0.1% |
| 6900 | 2396 | CAgUUGAGGAGUGCCUGAU | 0.1% |
| 6901 | 2396 | CAAUUGAGGAaUGCCUGAU | 1.0% |
| 6902 | 2396 | CAAUUGAGGAGUGCCUaAU | 0.2% |
| 2397 | 2397 | AAUUGAGGAGUGCCUGAUU | 98.6% |
| 6903 | 2397 | AAUUGAGGAGUGCCUGgUU | 0.1% |
| 6904 | 2397 | AgUUGAGGAGUGCCUGAUU | 0.1% |
| 6905 | 2397 | AAUUGAGGAaUGCCUGAUU | 1.0% |
| 6906 | 2397 | AAUUGAGGAGUGCCUaAUU | 0.2% |
| 2398 | 2398 | UAGAGCCUAUGUGGAUGGA | 98.3% |
| 6907 | 2398 | UAGAGCCUAUGUGGAUGGg | 0.6% |
| 6908 | 2398 | UAaAGCCUAUGUGGAUGGA | 0.1% |
| 6909 | 2398 | UAGAaCCUAUGUGGAUGGA | 0.6% |
| 6910 | 2398 | UAGAGCCUAUGUaGAUGGA | 0.2% |
| 6911 | 2398 | UAGAGCCUAUGUGGAUaGA | 0.1% |
| 2399 | 2399 | AGAGCCUAUGUGGAUGGAU | 98.3% |
| 6912 | 2399 | AGAGCCUAUGUGGAUGGgU | 0.6% |
| 6913 | 2399 | AaAGCCUAUGUGGAUGGAU | 0.1% |
| 6914 | 2399 | AGAaCCUAUGUGGAUGGAU | 0.6% |
| 6915 | 2399 | AGAGCCUAUGUaGAUGGAU | 0.2% |
| 6926 | 2399 | AGAGCCUAUGUGGAUaGAU | 0.1% |
| 2400 | 2400 | GAGCCUAUGUGGAUGGAUU | 98.2% |
| 6917 | 2400 | GAGCCUAUGUGGAUGGgUU | 0.6% |
| 6913 | 2400 | aAGCCUAUGUGGAUGGAUU | 0.1% |
| 6919 | 2400 | GAaCCUAUGUGGAUGGAUU | 0.6% |
| 6920 | 2400 | GAGCGUAUGUaGAUGGAUU | 0.2% |
| 6921 | 2400 | GAGCCUAUGUGGAUaGAUU | 0.1% |
| 6922 | 2400 | GAGCCUAUGUGGAUGGAUa | 0.1% |
| 2401 | 2401 | UAAUGAUCCCUGGGUUUUG | 98.0% |
| 6923 | 2401 | UAAcGAUCCCUGGGUUUUG | 1.8% |
| 6924 | 2401 | UAAUGAUCCCUGGGcUUUG | 0.1% |
| 6925 | 2401 | UAAUGAUCCCUGGGUUcUG | 0.1% |
| 2402 | 2402 | UUAAUGAUCCCUGGGUUUU | 98.0% |
| 6926 | 2402 | UUAAcGAUCCCUGGGUUUU | 1.8% |
| 6927 | 2402 | UUAAUGAUCCCUGGGcUUU | 0.1% |
| 6928 | 2402 | UUAAUGAUCCCUGGGUUcU | 0.1% |
| 2403 | 2403 | AUGAUCCCUGGGUUUUGCU | 98.0% |
| 6929 | 2403 | AcGAUCCGUGGGUUUUGCU | 1.8% |
| 6930 | 2403 | AUGAUCCCUGGGcUUUGCU | 0.1% |
| 6931 | 2403 | AUGAUCCCUGGGUUcUGCU | 0.1% |
| 2404 | 2404 | AAUGAUCCCUGGGUUUUGC | 98.0% |
| 6932 | 2404 | AACGAUCCCUGGGUUUUGC | 1.8% |
| 6933 | 2404 | AAUGAUCCCUGGGcUUUGC | 0.1% |
| 6934 | 2404 | AAUGAUCCCUGGGUUcUGC | 0.1% |
| 2405 | 2405 | CCUGAUUAAUGAUCCCUGG | 97.9% |
| 6935 | 2405 | CCUGgUUAAUGAUCCCUGG | 0.1% |
| 6936 | 2405 | CCUaAUUAAUGAUCCCUGG | 0.2% |
| 6937 | 2405 | CCUGAUUAAcGAUCCCUGG | 1.8% |
| 2406 | 2406 | UGCCUGAUUAAUGAUCCCU | 97.9% |
| 6938 | 2406 | UGCCUGgUUAAUGAUCCCU | 0.1% |
| 6939 | 2406 | UGCCUaAUUAAUGAUCCCU | 0.2% |
| 6940 | 2406 | UGCCUGAUUAAcGAUCCCU | 1.8% |
| 2407 | 2407 | AUUAAUGAUCCCUGGGUUU | 97.9% |
| 6941 | 2407 | gUUAAUGAUCCCUGGGUUU | 0.1% |
| 6942 | 2407 | AUUAAcGAUCCCUGGGUUU | 1.8% |
| 6943 | 2407 | AUUAAUGAUCCCUGGGcUU | 0.1% |
| 6944 | 2407 | AUUAAUGAUCCCUGGGUUc | 0.1% |
| 2408 | 2408 | GCCUGAUUAAUGAUCCCUG | 97.9% |
| 6945 | 2408 | GCCUGgUUAAUGAUCCCUG | 0.1% |
| 6946 | 2408 | GCCUaAUUAAUGAUCCCUG | 0.2% |
| 6947 | 2408 | GCCUGAUUAAcGAUCCCUG | 1.8% |
| 2409 | 2409 | CUGAUUAAUGAUCCCUGGG | 97.9% |
| 6948 | 2409 | CUGgUUAAUGAUCCCUGGG | 0.1% |
| 6949 | 2409 | CUaAUUAAUGAUCCCUGGG | 0.2% |
| 6950 | 2409 | CUGAUUAAcGAUCCCUGGG | 1.8% |
| 2410 | 2410 | GAUUAAUGAUCCCUGGGUU | 97.8% |
| 6951 | 2410 | GgUUAAUGAUCCCUCGGUU | 0.1% |
| 6952 | 2410 | aAUUAAUGAUCCCUGGGUU | 0.2% |
| 6953 | 2410 | GAUUAAcGAUCCCUGGGUU | 1.8% |
| 6954 | 2410 | GAUUAAUGAUCCCUGGGcU | 0.1% |
| 2411 | 2411 | UGAUUAAUGAUCCCUGGGU | 97.8% |
| 6955 | 2411 | UGgUUAAUGAUCCCUGGGU | 0.1% |
| 6956 | 2411 | UaAUUAAUGAUCCCUGGGU | 0.2% |
| 6957 | 2411 | UGAUUAAcGAUCCCUGGGU | 1.8% |
| 6958 | 2411 | UGAUUAAUGAUCCCUGGGc | 0.1% |
| 2412 | 2412 | UAUAUGAAGCAAUUGAGGA | 97.3% |
| 6959 | 2412 | UAUAUGAAGCAgUUGAGGA | 0.1% |
| 6960 | 2412 | UAUAUGgAGCAAUUGAGGA | 2.6% |
| 2413 | 2413 | CUAUAUGAAGCAAUUGAGG | 97.2% |
| 6961 | 2413 | CUAUAUGAAGCAgUUGAGG | 0.1% |
| 6962 | 2413 | CUAUAUGgAGCAAUUGAGG | 2.6% |
| 6963 | 2413 | uUAUAUGAAGCAAUUGAGG | 0.1% |
| 2414 | 2414 | CUUGGUUCAACUCCUUCCU | 97.1% |
| 6964 | 2414 | CUUGGUUCAACUCCCUCuU | 0.1% |
| 6965 | 2414 | CUUGGUUuAACUCCUUCCU | 0.2% |
| 6966 | 2414 | CaUGGUUCAACUCCUUCCU | 0.1% |
| 6967 | 2414 | CcUGGUUCAACUCCUUCCU | 0.9% |
| 6968 | 2414 | CgUGGUUCAACUCCUUCCU | 1.6% |
| 2415 | 2415 | UCUUGGUUCAACUCCUUCC | 97.1% |
| 6969 | 2415 | UCUUCGUUCAACUCCUUCu | 0.1% |
| 6970 | 2415 | UCUUGGUUuAACUCCUUCC | 0.2% |
| 6971 | 2415 | UCaUGGUUCAACUCCUUCC | 0.1% |
| 6972 | 2415 | UCcUGGUUCAACUCCUUCC | 0.9% |
| 6973 | 2415 | UCgUGGUUCAACUCCUUCC | 1.6% |
| 2416 | 2416 | AGGAGUGCCUGAUUAAUGA | 96.9% |
| 6974 | 2416 | AGGAGUGCCUGgUUAAUGA | 0.1% |
| 6975 | 2416 | AGGAaUGCCUGAUUAAUGA | 1.0% |
| 6976 | 2416 | AGGAGUGCCUaAUUAAUGA | 0.2% |
| 6977 | 2416 | AGGAGUGCCUGAUUAAcGA | 1.8% |
| 2417 | 2417 | GAGUGCCUGAUUAAUGAUC | 96.9% |
| 6978 | 2417 | GAGUGCCUGgUUAAUGAUC | 0.1% |
| 6979 | 2417 | GAaUGCCUGAUUAAUGAUC | 1.0% |
| 6980 | 2417 | GAGUGCCUaAUUAAUGAUC | 0.2% |
| 6981 | 2417 | GAGUGCCUGAUUAAcGAUC | 1.8% |
| 2418 | 2418 | UGAGGAGUGCCUGAUUAAU | 96.9% |
| 6982 | 2418 | UGAGGAGUGCCUGgUUAAU | 0.1% |
| 6963 | 2418 | UGAGGAaUGCCUGAUUAAU | 1.0% |
| 6984 | 2418 | UGAGGAGUGCCUaAUUAAU | 0.2% |
| 6985 | 2418 | UGAGGAGUGCCUGAUUAAc | 1.8% |
| 2419 | 2419 | GUGCCUGAUUAAUGAUCCC | 96.9% |
| 6986 | 2419 | GUGCCUGgUUAAUGAUCCC | 0.1% |
| 6987 | 2419 | aUGCCUGAUUAAUGAUCCC | 1.0% |
| 6988 | 2419 | GUGCCUaAUUAAUGAUCCC | 0.2% |
| 6989 | 2419 | GUGCCUGAUUAAcGAUCCC | 1.8% |
| 2420 | 2420 | GGAGUGCCUGAUUAAUGAU | 96.9% |
| 6990 | 2420 | GGAGUGCCUGgUUAAUGAU | 0.1% |
| 6991 | 2420 | GGAaUGCCUGAUUAAUGAU | 1.0% |
| 6992 | 2420 | GGAGUGCCUaAUUAAUGAU | 0.2% |
| 6993 | 2420 | GGAGUGCCUGAUUAAcGAU | 1.8% |
| 2421 | 2421 | GAGGAGUGCCUGAUUAAUG | 96.9% |
| 6994 | 2421 | GAGGAGUGCCUGgUUAAUG | 0.1% |
| 6995 | 2421 | GAGGAaUGCCUGAUUAAUG | 1.0% |
| 6996 | 2421 | GAGGAGUGCCUaAUUAAUG | 0.2% |
| 6997 | 2421 | GAGGAGUGCCUGAUUAAcG | 1.8% |
| 2422 | 2422 | AGUGCCUGAUUAAUGAUCC | 96.9% |
| 6998 | 2422 | AGUGCGUGgUUAAUGAUCC | 0.1% |
| 6999 | 2422 | AaUGCCUGAUUAAUGAUCC | 1.0% |
| 7000 | 2422 | AGUGCCUaAUUAAUGAUCC | 0.2% |
| 7001 | 2422 | AGUGCCUGAUUAAcGAUCC | 1.8% |
| 2423 | 2423 | UAUGAAGCAAUUGAGGAGU | 96.4% |
| 7002 | 2423 | UAUGAAGCAgUUGAGGAGU | 0.1% |
| 7003 | 2423 | UAUGgAGCAAUUGAGGAGU | 2.6% |
| 7004 | 2423 | UAUGAAGCAAUUGAGGAaU | 1.0% |
| 2424 | 2424 | AUAUGAAGCAAUUGAGGAG | 96.4% |
| 7005 | 2424 | AUAUGAAGCAgUUGAGGAG | 0.1% |
| 7006 | 2424 | AUAUGgAGCAAUUGAGGAG | 2.6% |
| 7007 | 2424 | AUAUGAAGCAAUUGAGGAa | 1.0% |
| 2425 | 2425 | AUGAAGCAAUUGAGGAGUG | 96.4% |
| 7008 | 2425 | AUGAAGCAgUUGAGGAGUG | 0.1% |
| 7009 | 2425 | AUGgAGCAAUUGAGGAGUG | 2.6% |
| 7010 | 2425 | AUGAAGCAAUUGAGGAaUG | 1.0% |
| 2426 | 2426 | UGAAGCAAUUGAGGAGUGC | 96.4% |
| 7011 | 2426 | UGAAGCAgUUGAGGAGUGC | 0.1% |
| 7012 | 2426 | UGgAGCAAUUGAGGAGUGC | 2.6% |
| 7013 | 2426 | UGAAGCAAUUGAGGAaUGC | 1.0% |
| 2427 | 2427 | AAGCAAUUGAGGAGUGCCU | 96.4% |
| 7014 | 2427 | AAGCAgUUGAGGAGUGCCU | 0.1% |
| 7015 | 2427 | gAGCAAUUGAGGAGUGCCU | 2.6% |
| 7016 | 2427 | AAGCAAUUGAGGAaUGCCU | 1.0% |
| 2428 | 2428 | GAAGCAAUUGAGGAGUGCC | 96.4% |
| 7017 | 2428 | GAAGCAgUUGAGGAGUGCC | 0.1% |
| 7018 | 2428 | GgAGCAAUUGAGGAGUGCC | 2.6% |
| 7019 | 2428 | GAAGCAAUUGAGGAaUGCC | 1.0% |
| 2429 | 2429 | ACAAAUUUGCAGCAAUAUG | 95.4% |
| 7020 | 2429 | AcAAAUUUGCgGCAAUAUG | 0.3% |
| 7021 | 2429 | ACAAAUUcGCAGCAAUAUG | 0.1% |
| 7022 | 2429 | ACAAAUUUGCUGCAAUAUG | 0.4% |
| 7023 | 2429 | ACAAgUUUGCuGCAAUAUG | 1.5% |
| 7024 | 2429 | ACAAgUUcGCuGCAAUAUG | 1.8% |
| 2430 | 2430 | AACAAAUUUGCAGCAAUAU | 95.4% |
| 7025 | 2430 | AAcAAAUUUGCgGCAAUAU | 0.3% |
| 7026 | 2430 | AACAAAUUcGCAGCAAUAU | 0.1% |
| 7027 | 2430 | AACAAAUUUGCuGCAAUAU | 0.4% |
| 7028 | 2430 | AACAAgUUUGCuGCAAUAU | 1.5% |
| 7029 | 2430 | AAcAAgUUcGCuGCAAUAU | 1.8% |
| 2431 | 2431 | GGGCUAUAUGAAGCAAUUG | 95.3% |
| 7030 | 2431 | GGGCUAUAUGAAGCAgUUG | 0.1% |
| 7031 | 2431 | GGGCUAUAUGgAGCAAUUG | 2.6% |
| 7032 | 2431 | GGGuUAUAUGAAGCAAUUG | 0.1% |
| 7033 | 2431 | GGaCUAUAUGAAGCAAUUG | 1.9% |
| 2432 | 2432 | GCUAUAUGAAGCAAUUGAG | 95.3% |
| 7034 | 2432 | GCUAUAUGAAGCAgUUGAG | 0.1% |
| 7035 | 2432 | GCUAUAUGgAGCAAUUGAG | 2.6% |
| 7036 | 2432 | GuUAUAUGAAGCAAUUGAG | 0.1% |
| 7037 | 2432 | aGUAUAUGAAGCAAUUGAG | 1.9% |
| 2433 | 2433 | UCAUGUAUUCAGAUUUUCA | 95.3% |
| 7038 | 2433 | UCAUGUAUUCgGAUUUUCA | 1.9% |
| 7039 | 2433 | UuAUGUAUUCAGAUUUUCA | 0.1% |
| 7040 | 2433 | UCAUGUAcUCAGAUUUUCA | 0.1% |
| 7041 | 2433 | UCAUGUAUUCAGAcUUUGA | 0.1% |
| 7042 | 2433 | UCAUGUAUUCAGAUUUcCA | 0.1% |
| 7043 | 2433 | UCAUGUAUUCgGAUUUcCA | 0.1% |
| 7044 | 2433 | UCAUGUAUUCAGAcUUcCA | 2.2% |
| 2434 | 2434 | GGCUAUAUGAAGCAAUUGA | 95.3% |
| 7045 | 2434 | GGCUAUAUGAAGCAgUUGA | 0.1% |
| 7046 | 2434 | GGCUAUAUGgAGCAAUUGA | 2.6% |
| 7047 | 2434 | GGuUAUAUGAAGCAAUUGA | 0.1% |
| 7048 | 2434 | GaCUAUAUGAAGCAAUUGA | 1.9% |
| 2435 | 2435 | CAAAUUUGCAGCAAUAUGC | 95.2% |
| 7049 | 2435 | CAAAUUUGCAGCAAUAUGu | 0.2% |
| 7050 | 2435 | CAAAUUUGCgGCAAUAUGC | 0.3% |
| 7051 | 2435 | CAAAUUcGCAGCAAUAUGC | 0.1% |
| 7052 | 2435 | CAAAUUUGCuGCAAUAUGC | 0.3% |
| 7053 | 2435 | CAAAUUUGCuGCAAUAUGu | 0.1% |
| 7054 | 2435 | CAAgUUUGCuGCAAUAUGC | 1.5% |
| 7055 | 2435 | CAAgUUcGCuGCAAUAUGC | 1.8% |
| 2436 | 2436 | AAAUUUGCAGCAAUAUGCA | 95.2% |
| 7056 | 2436 | AAAUUUGCAGCAAUAUGuA | 0.2% |
| 7057 | 2436 | AAAUUUGCgGCAAUAUGCA | 0.3% |
| 7058 | 2436 | AAAUUcGCAGCAAUAUGCA | 0.1% |
| 7059 | 2436 | AAAUUUGCuGCAAUAUGCA | 0.3% |
| 7060 | 2436 | AAAUUUGCuGCAAUAUGuA | 0.1% |
| 7061 | 2436 | AAgUUUGCuGCAAUAUGCA | 1.5% |
| 7062 | 2436 | AAgUUcGCuGCAAUAUGCA | 2.1% |
| 2437 | 2437 | UUCAUGUAUUCAGAUUUUC | 95.2% |
| 7063 | 2437 | UUcAUGUAUUCgGAUUUUC | 1.9% |
| 7064 | 2437 | UUuAUGUAUUCAGAUUUUC | 0.1% |
| 7065 | 2437 | cUCAUGUAUUCAGAUUUUC | 0.1% |
| 7066 | 2437 | UUCAUGUAcUCAGAUUUUC | 0.1% |
| 7067 | 2437 | UUCAUGUAUUCAGAcUUUC | 0.1% |
| 7068 | 2437 | UUCAUGUAUUCAGAUUUcC | 0.1% |
| 7069 | 2437 | UUCAUGUAUUCgGAUUUcC | 0.1% |
| 7070 | 2437 | UUCAUGUAUUCAGAcUUcC | 2.2% |
| 2438 | 2438 | AAUUUGCAGCAAUAUGCAC | 95.1% |
| 7071 | 2438 | AAUUUGCAGCAAUAUGCAu | 0.1% |
| 7072 | 2438 | AAUUUGCAGCAAUAUGuAC | 0.2% |
| 7073 | 2438 | AAUUUGCgGcAAUAUGCAC | 0.3% |
| 7074 | 2438 | AAUUcGCAGCAAUAUGCAC | 0.1% |
| 7075 | 2438 | AAUUUGCuGCAAUAUGGAC | 0.3% |
| 7076 | 2438 | AAUUUGCuGCAAUAUGuAC | 0.1% |
| 7077 | 2438 | AgUUUGCuGCAAUAUGCAC | 1.5% |
| 7078 | 2438 | AgUUcGCuGCAAUAUGCAC | 2.1% |
| 2439 | 2439 | ACAAACAAAUUUGCAGCAA | 95.0% |
| 7079 | 2439 | ACAAACAAAUUUGCgGCAA | 0.3% |
| 7080 | 2439 | ACgAACAAAUUUGCAGCAA | 0.3% |
| 7081 | 2439 | ACAAACAAAUUcGCAGCAA | 0.1% |
| 7082 | 2439 | ACAAACAAAUUUGCuGCAA | 0.1% |
| 7083 | 2439 | ACuAACAAAUUUGCAGCAA | 0.1% |
| 7084 | 2439 | ACgAACAAAUUUGCuGCAA | 0.3% |
| 7085 | 2439 | ACgAACAAgUUUGCuGCAA | 1.5% |
| 7066 | 2439 | ACAAACAAgUUcGCuGCAA | 1.8% |
| 2440 | 2440 | CAAACAAAUUUGCAGCAAU | 95.0% |
| 7087 | 2440 | CAAACAAAUUUGCgGCAAU | 0.3% |
| 7088 | 2440 | CgAACAAAUUUGCAGCAAU | 0.3% |
| 7089 | 2440 | GAAACAAAUUcGCAGCAAU | 0.1% |
| 7090 | 2440 | CAAACAAAUUUGCuGCAAU | 0.1% |
| 7091 | 2440 | CuAACAAAUUUGCAGCAAU | 0.1% |
| 7092 | 2440 | CgAACAAAUUUGCuGCAAU | 0.3% |
| 7093 | 2440 | CgAACAAgUUUGCuGCAAU | 1.5% |
| 7094 | 2440 | CAAACAAgUUcGCuGCAAU | 1.8% |
| 2441 | 2441 | AAACAAAUUUGCAGCAAUA | 95.0% |
| 7095 | 2441 | AAACAAAUUUGCgGCAAUA | 0.3% |
| 7096 | 2441 | gAACAAAUUUGCAGCAAUA | 0.3% |
| 7097 | 2441 | AAACAAAUUcGCAGCAAUA | 0.1% |
| 7098 | 2441 | AAAcAAAUUUGCuGCAAUA | 0.1% |
| 7099 | 2441 | uAACAAAUUUGCAGCAAUA | 0.1% |
| 7100 | 2441 | gAACAAAUUUGCuGCAAUA | 0.3% |
| 7101 | 2441 | gAACAAgUUUGCuGCAAUA | 1.5% |
| 7102 | 2441 | AAACAAgUUcGCuGCAAUA | 1.8% |
| 2442 | 2442 | UUUUAGAGCCUAUGUGGAU | 94.9% |
| 7103 | 2442 | cUUUAGAGCCUAUGUGGAU | 4.2% |
| 7104 | 2442 | UUUUAaAGCCUAUGUGGAU | 0.1% |
| 7105 | 2442 | UUUUAGAGCCUAUGUaGAU | 0.2% |
| 7106 | 2442 | cUUUAGAaCCUAUGUGGAU | 0.6% |
| 2443 | 2443 | AAUUUUAGAGCCUAUGUGG | 94.7% |
| 7107 | 2443 | AgUUUUAGAGCCUAUGUGG | 0.1% |
| 7108 | 2443 | AAcUUUAGAGCCUAUGUGG | 4.1% |
| 7109 | 2443 | AAUUUUAaAGCCUAUGUGG | 0.1% |
| 7110 | 2443 | AAUUUUAGAGCCUAUGUaG | 0.2% |
| 7111 | 2443 | AuUUUUAGAGCCUAUGUGG | 0.1% |
| 7112 | 2443 | AAcUUUAGAaCCUAUGUGG | 0.6% |
| 7113 | 2443 | AccUUUAGAGCCUAUGUGG | 0.1% |
| 2444 | 2444 | AUUUUAGAGCCUAUGUGGA | 94.7% |
| 7114 | 2444 | gUUUUAGAGCCUAUGUGGA | 0.1% |
| 7115 | 2444 | AcUUUAGAGCCUAUGUGGA | 4.1% |
| 7116 | 2444 | AUUUUAaAGCCUAUGUGGA | 0.1% |
| 7117 | 2444 | AUUUUAGAGCCUAUGUaGA | 0.2% |
| 7118 | 2444 | uUUUUAGAGCCUAUGUGGA | 0.1% |
| 7119 | 2444 | AcUUUAGAaCCUAUGUGGA | 0.6% |
| 7120 | 2444 | ccUUUAGAGCCUAUGUGGA | 0.1% |
| 2445 | 2445 | GUAUUCAGAUUUUCAUUUC | 94.6% |
| 7121 | 2445 | GUAUUCgGAUUUUCAUUUC | 0.1% |
| 7122 | 2445 | GUAcUCAGAUUUUCAUUUC | 0.1% |
| 7123 | 2445 | GUAUUCAGAcUUUCAUUUC | 0.1% |
| 7124 | 2445 | GUAUUCAGAUUUUCAcUUC | 0.9% |
| 7125 | 2445 | GUAUUCgGAUUUUCACUUu | 1.8% |
| 7126 | 2445 | GUAUUCAGAcUUcCAUUUC | 2.1% |
| 7127 | 2445 | GUAUUCAGAUUUcCAcUUC | 0.1% |
| 7128 | 2445 | GUAUUCAGAcUUcCAUUUu | 0.1% |
| 7129 | 2445 | GUAUUCgGAUUUcCAcUUC | 0.1% |
| 2446 | 2446 | GCAUCCUGUGCAGCAAUGG | 94.6% |
| 7130 | 2446 | GCAUCCUGUGCAGCgAUGG | 0.2% |
| 7131 | 2446 | GCAUCCUGUGuAGCAAUGG | 0.1% |
| 7132 | 2446 | GCAUCuUGUGCAGCAAUGG | 1.1% |
| 7133 | 2446 | GCgUCCUGUGCAGCAAUGG | 0.2% |
| 7134 | 2446 | GCAUCCUGUGCAGCcAUGG | 1.7% |
| 7135 | 2446 | GCAUCuUGUGCAGCcAUGG | 2.0% |
| 7136 | 2446 | GCAUCuUGUGCAGuuAUGG | 0.1% |
| 2447 | 2447 | AUGCAUCCUGUGCAGCAAU | 94.6% |
| 7137 | 2447 | AUGCAUCCUGUGCAGCgAU | 0.2% |
| 7138 | 2447 | AUGCAUCCUGUGuAGCAAU | 0.1% |
| 7139 | 2447 | AUGCAUCuUGUGCAGCAAU | 1.1% |
| 7140 | 2447 | AUGCgUCCUGUGCAGCAAU | 0.2% |
| 7141 | 2447 | AUGCAUCCUGUGCAGCcAU | 1.7% |
| 7142 | 2447 | AUGCAUCuUGUGCAGCcAU | 2.0% |
| 7143 | 2447 | AUGCAUCuUGUGCAGuuAU | 0.1% |
| 2448 | 2448 | UAUUCAGAUUUUCAUUUCA | 94.6% |
| 7144 | 2448 | UAUUCgGAUUUUCAUUUCA | 0.1% |
| 7145 | 2448 | UAcUCAGAUUUUCAUUUCA | 0.1% |
| 7146 | 2448 | UAUUCAGAcUUUCAUUUCA | 0.1% |
| 7147 | 2448 | UAUUCAGAUUUUCAcUUCA | 0.9% |
| 7148 | 2448 | UAUUCgGAUUUUcAcUUuA | 1.5% |
| 7149 | 2448 | UAUUCAGAcUUcCAUUUCA | 2.1% |
| 7150 | 2448 | UAUUCAGAUUUcCAcUUCA | 0.1% |
| 7151 | 2448 | UAUUCAGAcUUcCAUUUuA | 0.1% |
| 7152 | 2448 | UAUUCgGAUUUcCAcUUCA | 0.1% |
| 2449 | 2449 | GAAACAAACAAAUUUGCAG | 94.6% |
| 7153 | 2449 | GAAACAAACAAAUUUGCgG | 0.3% |
| 7154 | 2449 | GAAACgAACAAAUUUGCAG | 0.3% |
| 7155 | 2449 | GAgACAAACAAAUUUGCAG | 0.4% |
| 7156 | 2449 | GAAACAAACAAAUUcGCAG | 0.1% |
| 7157 | 2449 | GAAACAAACAAAUUUGCuG | 0.1% |
| 7158 | 2449 | GAAACuAACAAAUUUGCAG | 0.1% |
| 7159 | 2449 | GAAACgAACAAAUUUGCuG | 0.3% |
| 7160 | 2449 | GAAACgAACAAgUUUGCuG | 1.5% |
| 7161 | 2449 | GAAACAAACAAgUUcGCuG | 1.8% |
| 2450 | 2450 | UGUAUUCAGAUUUUCAUUU | 94.6% |
| 7162 | 2450 | UGUAUUCgGAUUUUCAUUU | 0.1% |
| 7163 | 2450 | UGUAcUCAGAUUUUCAUUU | 0.1% |
| 7164 | 2450 | UGUAUUCAGAcUUUCAUUU | 0.1% |
| 7165 | 2450 | UGUAUUCAGAUUUUCAcUU | 0.9% |
| 7166 | 2450 | UGUAUUCgGAUUUUCAcUU | 1.8% |
| 7167 | 2450 | UGUAUUCAGAcUUCcAUUU | 2.2% |
| 7168 | 2450 | UGUAUUCAGAUUUcCAcUU | 0.1% |
| 7169 | 2450 | UGUAUUCgGAUUUcCAcUU | 0.1% |
| 2451 | 2451 | AAUGCAUCCUGUGCAGCAA | 94.6% |
| 7170 | 2451 | AAUGCAUCCUGUGCAGCgA | 0.2% |
| 7171 | 2451 | AAUGCAUCCUGUGuAGCAA | 0.1% |
| 7172 | 2451 | AAUGCAUCuUGUGCAGCAA | 1.1% |
| 7173 | 2451 | AAUGCgUCCUGUGCAGCAA | 0.2% |
| 7174 | 2451 | AAUGCAUCCUGUGCAGCcA | 1.7% |
| 7175 | 2451 | AAUGCAUCuUGUGCAGCcA | 2.0% |
| 7176 | 2451 | AAUGCAUCuUGUGCAGuuA | 0.1% |
| 2452 | 2452 | AACAAACAAAUUUGCAGCA | 94.6% |
| 7177 | 2452 | AACAAACAAAUUUGCgGCA | 0.3% |
| 7178 | 2452 | AACgAACAAAUUUGCAGCA | 0.3% |
| 7179 | 2452 | gACAAAGAAAUUUGCAGCA | 0.4% |
| 7180 | 2452 | AACAAACAAAUUcGCAGCA | 0.1% |
| 7181 | 2452 | AACAAACAAAUUUGCuGCA | 0.1% |
| 7182 | 2452 | AACuAACAAAUUUGCAGCA | 0.1% |
| 7183 | 2452 | AACgAACAAAUUUGCuGCA | 0.3% |
| 7184 | 2452 | AACgAACAAgUUUGCuGCA | 1.5% |
| 7185 | 2452 | AAcAAACAAgUUcGCuGCA | 1.8% |
| 2453 | 2453 | AAACAAACAAAUUUGCAGC | 94.6% |
| 7186 | 2453 | AAACAAACAAAUUUGCgGC | 0.3% |
| 7187 | 2453 | AAACgAACAAAUUUGCAGC | 0.3% |
| 7188 | 2453 | AgACAAACAAAUUUGCAGC | 0.4% |
| 7189 | 2453 | AAACAAACAAAUUcGCAGC | 0.1% |
| 7190 | 2453 | AAACAAACAAAUUUGCuGC | 0.1% |
| 7191 | 2453 | AAACuAACAAAUUUGCAGC | 0.1% |
| 7192 | 2453 | AAACgAACAAAUUUGCuGC | 0.3% |
| 7193 | 2453 | AAACgAACAAgUUUGCuGC | 1.5% |
| 7194 | 2453 | AAACAAACAAgUUcGCuGC | 1.8% |
| 2454 | 2454 | CAUCCUGUGCAGCAAUGGA | 94.6% |
| 7195 | 2454 | CAUCCUGUGCAGCgAUGGA | 0.2% |
| 7196 | 2454 | CAUCCUGUGuAGCAAUGGA | 0.1% |
| 7197 | 2454 | CAUCuUGUGCAGCAAUGGA | 1.1% |
| 7198 | 2454 | CgUCGUGUGCAGCAAUGGA | 0.2% |
| 7199 | 2454 | CAUCCUGUGCAGCcAUGGA | 1.7% |
| 7200 | 2454 | CAUCuUGUGCAGCcAUGGA | 2.0% |
| 7201 | 2454 | CAUCuUGUGCAGuuAUGGA | 0.1% |
| 2455 | 2455 | AUUCAGAUUUUCAUUUCAU | 94.6% |
| 7202 | 2455 | AUUCgGAUUUUCAUUUCAU | 0.1% |
| 7203 | 2455 | AcUCAGAUUUUCAUUUCAU | 0.1% |
| 7204 | 2455 | AUUCAGAcUUUCAUUUCAU | 0.1% |
| 7205 | 2455 | AUUCAGAUUUUCAcUUCAU | 0.9% |
| 7206 | 2455 | AUUCgGAUUUUGAcUUuAU | 1.5% |
| 7207 | 2455 | AUUCAGAcUUcCAUUUCAU | 2.1% |
| 7208 | 2455 | AUUcAGAUUUcCAcUUCAU | 0.1% |
| 7209 | 2455 | AUUCAGAcUUcCAUUUuAU | 0.1% |
| 7210 | 2455 | AUUCgGAUUUcCAcUUCAU | 0.1% |
| 2456 | 2456 | AUGUAUUCAGAUUUUCAUU | 94.6% |
| 7211 | 2456 | AUGUAUUCgGAUUUUCAUU | 0.1% |
| 7212 | 2456 | AUGUAcUCAGAUUUUGAUU | 0.1% |
| 7213 | 2456 | AUGUAUUCAGAcUUUCAUU | 0.1% |
| 7214 | 2456 | AUGUAUUCAGAUUUUCAcU | 0.9% |
| 7215 | 2456 | AUGUAUUCgGAUUUUCAcU | 1.8% |
| 7216 | 2456 | AUGUAUUCAGAcUUcCAUU | 2.2% |
| 7217 | 2456 | AUGUAUUCAGAUUUcCAcU | 0.1% |
| 7218 | 2456 | AUGUAUUCgGAUUUcCAcU | 0.1% |
| 2457 | 2457 | UGCAUCCUGUGCAGCAAUG | 94.6% |
| 7219 | 2457 | UGCAUCCUGUGCAGCgAUG | 0.2% |
| 7220 | 2457 | UGCAUCCUGUGuAGCAAUG | 0.1% |
| 7221 | 2457 | UGCAUCuUGUGCAGCAAUG | 1.1% |
| 7222 | 2457 | UGCgUCCUGUGCAGCAAUG | 0.2% |
| 7223 | 2457 | UGCAUCCUGUGCAGCcAUG | 1.7% |
| 7224 | 2457 | UGCAUCuUGUGCAGCcAUG | 2.0% |
| 7225 | 2457 | UGCAUCuUGUGCAGuuAUG | 0.1% |
| 2458 | 2458 | CAUGUAUUCAGAUUUUCAU | 94.5% |
| 7226 | 2458 | CAUGUAUUCgGAUUUUCAU | 0.1% |
| 7227 | 2458 | UAUGUAUUCAGAUUUUCAU | 0.1% |
| 7228 | 2458 | CAUGUAcUCAGAUUUUCAU | 0.1% |
| 7229 | 2458 | CAUGUAUUCAGAcUUUCAU | 0.1% |
| 7230 | 2458 | CAUGUAUUCAGAUUUUCAc | 0.9% |
| 7231 | 2458 | CAUGUAUUCgGAUUUUCAc | 1.8% |
| 7232 | 2458 | CAUGUAUUCAGAcUUcCAU | 2.2% |
| 7233 | 2458 | CAUGUAUUCAGAUUUcCAc | 0.1% |
| 7234 | 2458 | CAUGUAUUCgGAUUUcCAc | 0.1% |
| 2459 | 2459 | AGAAUUUUAGAGCCUAUGU | 94.3% |
| 7235 | 2459 | AGAgUUUUAGAGCCUAUGU | 0.1% |
| 7236 | 2459 | AaAAUUUUAGAGCCUAUGU | 0.5% |
| 7237 | 2459 | AGAAcUUUAGAGCCUAUGU | 0.5% |
| 7238 | 2459 | AGAAUUUUAaAGCCUAUGU | 0.1% |
| 7239 | 2459 | AGAuUUUUAGAGCCUAUGU | 0.1% |
| 7240 | 2459 | AaAAcUUUAGAGCCUAUGU | 3.5% |
| 2460 | 2460 | GAGAAUUUUAGAGCCUAUG | 94.2% |
| 7241 | 2460 | GAGAgUUUUAGAGCCUAUG | 0.1% |
| 7242 | 2460 | aAGAAUUUUAGAGCCUAUG | 0.1% |
| 7243 | 2460 | GAaAAUUUUAGAGCCUAUG | 0.5% |
| 7244 | 2460 | GAGAACUUUAGAGCCUAUG | 0.5% |
| 7245 | 2460 | GAGAAUUUUAaAGCCUAUG | 0.1% |
| 7246 | 2460 | GAGAuUUUUAGAGCCUAUG | 0.1% |
| 7247 | 2460 | GAaAAcUUUAGAGCCUAUG | 3.5% |
| 2461 | 2461 | GAUUUUCAUUUCAUCAAUG | 94.2% |
| 7248 | 2461 | GAUUUUCAUUUCAUuAAUG | 0.5% |
| 7249 | 2461 | GAcUUUCAUUUCAUCAAUG | 0.1% |
| 7250 | 2461 | GAUUUUCAcUUCAUCAAUG | 0.7% |
| 7251 | 2461 | GAUUUUCAcUUCAUCgAUG | 0.1% |
| 7252 | 2461 | GAUUUcCAcUUCAUCAAUG | 0.2% |
| 2462 | 2462 | UGAGAAUUUUAGAGCCUAU | 94.2% |
| 7253 | 2462 | UGAGAgUUUUAGAGCCUAU | 0.1% |
| 7254 | 2462 | UaAGAAUUUUAGAGCCUAU | 0.1% |
| 7255 | 2462 | UGAaAAUUUUAGAGCCUAU | 0.5% |
| 7256 | 2462 | UGAGAAcUUUAGAGCCUAU | 0.5% |
| 7257 | 2462 | UGAGAAUUUUAaAGCCUAU | 0.1% |
| 7258 | 2462 | UGAGAuUUUUAGAGCCUAU | 0.1% |
| 7259 | 2462 | UGAaAAcUUUAGAGCCUAU | 3.5% |
| 2463 | 2463 | UUGAGAAUUUUAGAGCCUA | 94.2% |
| 7260 | 2463 | UUGAGAgUUUUAGAGCCUA | 0.1% |
| 7261 | 2463 | UUaAGAAUUUUAGAGCCUA | 0.1% |
| 7262 | 2463 | UUGAaAAUUUUAGAGCCUA | 0.5% |
| 7263 | 2463 | UUGAGAACUUUAGAGCCUA | 0.5% |
| 7264 | 2463 | UUGAGAAUUUUAaAGCCUA | 0.1% |
| 7265 | 2463 | UUGAGAuUUUUAGAGCCUA | 0.1% |
| 7266 | 2463 | UUGAaAAcUUUAGAGCCUA | 3.5% |
| 2464 | 2464 | AUUUUCAUUUCAUCAAUGA | 94.2% |
| 7267 | 2464 | AUUUUCAUUUCAUUAAUGA | 0.5% |
| 7268 | 2464 | AcUUUCAUUUCAUCAAUGA | 0.1% |
| 7269 | 2464 | AUUUUCAcUUCAUCAAUGA | 0.7% |
| 7270 | 2464 | AUUUUCAcUUCAUCgAUGA | 0.1% |
| 7271 | 2464 | AUUUcCAcUUCAUCAAUGA | 0.2% |
| 2465 | 2465 | UCAGAUUUUCAUUUCAUCA | 94.1% |
| 7272 | 2465 | UCAGAUUUUCAUUUCAUuA | 0.5% |
| 7273 | 2465 | UCgGAUUUUCAUUUCAUCA | 0.1% |
| 7274 | 2465 | UCAGAcUUUCAUUUCAUCA | 0.1% |
| 7275 | 2465 | UCAGAUUUUCAcUUCAUCA | 0.7% |
| 7276 | 2465 | UCAGAUUUUCAcUUCAUCg | 0.1% |
| 7277 | 2465 | UCAGAUUUCCACUUcAUCA | 0.1% |
| 7278 | 2465 | UCgGAUUUCCAcUUcAUCA | 0.1% |
| 2466 | 2466 | GAAUUUUAGAGCCUAUCUG | 94.1% |
| 7279 | 2466 | GAgUUUUAGAGCCUAUGUG | 0.1% |
| 7280 | 2466 | aAAUUUUAGAGCCUAUGUG | 0.5% |
| 7281 | 2466 | GAAcUUUAGAGCCUAUGUG | 0.5% |
| 7282 | 2466 | GAAUUUUAaAGCCUAUGUG | 0.1% |
| 7283 | 2466 | GAAUUUUAGAGCCUAUGUa | 0.2% |
| 7284 | 2466 | GAuUUUUAGAGCCUAUGUG | 0.1% |
| 7285 | 2466 | aAAcUUUAGAGCCUAUGUG | 3.5% |
| 2467 | 2467 | CAGAUUUUCAUUUCAUCAA | 94.1% |
| 7286 | 2467 | CAGAUUUUCAUUUCAUuAA | 0.5% |
| 7287 | 2467 | CgGAUUUUCAUUUCAUCAA | 0.1% |
| 7288 | 2467 | CAGAcUUUCAUUUCAUCAA | 0.1% |
| 7289 | 2467 | CAGAUUUUCAcUUCAUCAA | 0.7% |
| 7290 | 2467 | CAGAUUUUCAcUUCAUCgA | 0.1% |
| 7291 | 2467 | CAGAUUUcCAcUUCAUCAA | 0.1% |
| 7292 | 2467 | CgGAUUUcCAcUUCAUCAA | 0.1% |
| 2468 | 2468 | GUUCAGGCUCUUAGGGACA | 94.1% |
| 7293 | 2468 | GUUCAGGCUCUUAGGGAuA | 0.1% |
| 7294 | 2468 | CUUCACGCUuUUAGGGACA | 0.1% |
| 7295 | 2468 | aUUCAGGCUCUUAGGGACA | 0.1% |
| 7296 | 468G | GUcCAGCCUCUUAGGGACA | 0.1% |
| 7297 | 2468 | GUUCACGCcCUUACGGACA | 0.1% |
| 7298 | 2468 | GUUCAGGCUCUcAGGGACA | 0.3% |
| 7299 | 2468 | GUUCAGGCUCUUAaGGACA | 0.2% |
| 7300 | 2468 | GUUCAGGCUCUUAGaGACA | 0.2% |
| 7301 | 2468 | GUUCAGGCUCUUCGGGACA | 0.3% |
| 7302 | 2468 | GcUCAGGCaCUUAGGGACA | 1.8% |
| 7303 | 2468 | GUUCAaGCaCUUAGGGACA | 2.3% |
| 7304 | 2468 | GUUCAGGCUCUUAaGGAaA | 0.1% |
| 2469 | 2469 | UUCAGGCUCUUAGGGAcAA | 94.1% |
| 7305 | 2469 | UUCAGGCUCUUAGGGACAg | 0.1% |
| 7306 | 2469 | UUCAGGCUCUUAGGGAuAA | 0.1% |
| 7307 | 2469 | UUCAGGCUuUUAGGGACAA | 0.1% |
| 7308 | 2469 | UcCAGGCUCUUAGGGACAA | 0.1% |
| 7309 | 2469 | UUCAGGCcCUUAGGGACAA | 0.1% |
| 7310 | 2469 | UUCAGGCUCUcAGGGACAA | 0.3% |
| 7311 | 2469 | UUCAGGCUCUUAaGGACAA | 0.2% |
| 7312 | 2469 | UUCAGGCUCUUAGaGACAA | 0.2% |
| 7313 | 2469 | UUCAGGCUCUUCGGGACAA | 0.3% |
| 7314 | 2469 | cUCAGGCaCUUAGGGACAA | 1.8% |
| 7315 | 2469 | UUCAaGCaCUUAGGGACAA | 2.3% |
| 7316 | 2469 | UUCAGGCUCUUAaGGAaAA | 0.1% |
| 2470 | 2470 | AGAUUUUCAUUUCAUCAAU | 94.1% |
| 7317 | 2470 | AGAUUUUCAUUUCAUUAAU | 0.5% |
| 7318 | 2470 | gGAUUUUCAUUUCAUCAAU | 0.1% |
| 7319 | 2470 | AGAcUUUCAUUUCAUCAAU | 0.1% |
| 7320 | 2470 | AGAUUUUCAcUUCAUCAAU | 0.7% |
| 7321 | 2470 | AGAUUUUCAcUUCAUCgAU | 0.1% |
| 7322 | 2470 | AGAUUUcCAcUUCAUCAAU | 0.1% |
| 7323 | 2470 | gGAUUUcCAcUUCAUCAAU | 0.1% |
| 2471 | 2471 | UUCAGAUUUUCAUUUCAUC | 94.0% |
| 7324 | 2471 | UUCAGAUUUUCAUUUCAUu | 0.5% |
| 7325 | 2471 | UUCgGAUUUUCAUUUCAUC | 0.1% |
| 7326 | 2471 | cUCAGAUUUUCAUUUCAUC | 0.1% |
| 7327 | 2471 | UUCAGAcUUUCAUUUCAUC | 0.1% |
| 7328 | 2471 | UUCAGAUUUUCAcUUCAUC | 0.9% |
| 7329 | 2471 | UUCAGAUUUcCAcUUCAUC | 0.1% |
| 7330 | 2471 | UUCAGAcUUcCAUUUCAUu | 2.1% |
| 7331 | 2471 | UUCgGAUUUcCAcUUCAUC | 0.1% |
| 2472 | 2472 | AGAGGCGAAGAAACAAUUG | 93.7% |
| 7332 | 2472 | AGAGGCGAAGAgACAAUUG | 5.3% |
| 7333 | 2472 | AGAGGCGAgGAAACAAUUG | 0.2% |
| 7334 | 2472 | AGAGGCGAAaAAACAAUUG | 0.1% |
| 7335 | 2472 | AGAGGCGAAGAAACAAUcG | 0.2% |
| 7336 | 2472 | AGAGGCGAAGAAACnAUUG | 0.1% |
| 7337 | 2472 | AGAGGaGAAGAgACAAUUG | 0.3% |
| 2473 | 2473 | GAGGCGAAGAAACAAUUGA | 93.7% |
| 7338 | 2473 | GAGGCGAAGAgACAAUUGA | 5.3% |
| 7339 | 2473 | GAGGCGAgGAAACAAUUGA | 0.2% |
| 7340 | 2473 | GAGGCGAAaAAACAAUUGA | 0.1% |
| 7341 | 2473 | GAGGCGAAGAAACAAUcGA | 0.2% |
| 7342 | 2473 | GAGGCGAAGAAACnAUUGA | 0.1% |
| 7343 | 2473 | GAGGaGAAGAgACAAUUGA | 0.3% |
| 2474 | 2474 | GGCGAAGAAACAAUUGAAG | 93.5% |
| 7344 | 2474 | GGCGAAGAAACAAUUGAgG | 0.2% |
| 7345 | 2474 | GGCGAAGAgACAAUUGAAG | 5.3% |
| 7346 | 2474 | GGCGAgGAAACAAUUGAAG | 0.2% |
| 7347 | 2474 | GGCGAAaAAACAAUUGAAG | 0.1% |
| 7348 | 2474 | GGCGAAGAAACAAUcGAAG | 0.2% |
| 7349 | 2474 | GGCGAAGAAACnAUUGAAG | 0.1% |
| 7350 | 2474 | GGaGAAGAgACAAUUGAAG | 0.3% |
| 2475 | 2475 | CGAAGAAACAAUUGAAGAA | 93.5% |
| 7351 | 2475 | CGAAGAAACAAUUGAGGAA | 0.2% |
| 7352 | 2475 | CGAAGAgACAAUUGAAGAA | 5.3% |
| 7353 | 2475 | CGAgGAAACAAUUGAAGAA | 0.2% |
| 7354 | 2475 | CGAAaAAACAAUUGAAGAA | 0.1% |
| 7355 | 2475 | CGAAGAAACAAUcGAAGAA | 0.2% |
| 7356 | 2475 | CGAAGAAACnAUUGAAGAA | 0.1% |
| 7357 | 2475 | aGAAGAgACAAUUGAAGAA | 0.3% |
| 2476 | 2476 | GCGAAGAAACAAUUGAAGA | 93.5% |
| 7358 | 2476 | GCGAAGAAACAAUUGAgGA | 0.2% |
| 7359 | 2476 | GCGAAGAgACAAUUGAAGA | 5.3% |
| 7360 | 2476 | GGGAgGAAAGAAUUGAAGA | 0.2% |
| 7361 | 2476 | GCGAAaAAACAAUUGAAGA | 0.1% |
| 7362 | 2476 | GCGAAGAAACAAUcGAAGA | 0.2% |
| 7363 | 2476 | GCGAAGAAACnAUUGAAGA | 0.1% |
| 7364 | 2476 | GaGAAGAgACAAUUGAAGA | 0.3% |
| 2477 | 2477 | AGGCGAAGAAAGAAUUGAA | 93.5% |
| 7365 | 2477 | AGGCGAAGAAAGAAUUGAg | 0.2% |
| 7366 | 2477 | AGGCGAAGAgAGAAUUGAA | 5.3% |
| 7367 | 2477 | AGGCGAgGAAAGAAUUGAA | 0.2% |
| 7368 | 2477 | AGGCGAAaAAACAAUUGAA | 0.1% |
| 7369 | 2477 | AGGCGAAGAAACAAUcGAA | 0.2% |
| 7370 | 2477 | AGGCGAAGAAACnAUUGAA | 0.1% |
| 7371 | 2477 | AGGaGAAGAgACAAUUGAA | 0.3% |
| 2478 | 2478 | GAAGAAACAAUUGAAGAAA | 93.5% |
| 7372 | 2478 | GAAGAAACAAUUGAgGAAA | 0.2% |
| 7373 | 2478 | GAAGAgACAAUUGAAGAAA | 5.7% |
| 7374 | 2478 | GAgGAAACAAUUGAAGAAA | 0.2% |
| 7375 | 2478 | GAAaAAACAAUUGAAGAAA | 0.1% |
| 7376 | 2478 | GAAGAAACAAUcGAAGAAA | 0.2% |
| 7377 | 2478 | GAAGAAACnAUUGAAGAAA | 0.1% |
| 2479 | 2479 | AAAUGAAAUGGGGAAUGGA | 93.4% |
| 7378 | 2479 | AAAUGAAAUGGGGgAUCGA | 1.4% |
| 7379 | 2479 | AgAUGAAAUGGGGAAUGGA | 1.0% |
| 7380 | 2479 | AgAUGAAAUGGGGgAUGGA | 2.2% |
| 7381 | 2479 | AAAUGAAAUGGGGAAUaGA | 0.1% |
| 7382 | 2479 | AAAUGAAAUGGGGcAUGGA | 1.8% |
| 7383 | 2479 | AAAUGAAgUGGGGuAUGGA | 0.1% |
| 2480 | 2480 | AAAAUGAAAUGCGGAAUGG | 93.4% |
| 7384 | 2480 | AAAAUGAAAUGGGGgAUGG | 1.4% |
| 7385 | 2480 | AAgAUGAAAUGGGGAAUGG | 1.0% |
| 7386 | 2480 | AAgAUGAAAUCGGGgAUGG | 2.2% |
| 7387 | 2480 | AAAAUGAAAUGGGGAAUaG | 0.1% |
| 7388 | 2480 | AAAAUGAAAUGGGGcAUGG | 1.8% |
| 7389 | 2480 | AAAAUGAAgUGGGGUAUGG | 0.1% |
| 2481 | 2481 | UGAAAUGGGGAAUGGAGAU | 93.3% |
| 7390 | 2481 | UGAAAUGGGGgAUGGAGAU | 1.2% |
| 7391 | 2481 | UGAAAUGGGGAAUGGAaAU | 0.6% |
| 7392 | 2481 | UGAAAUGGGGAAUGGAGcU | 0.4% |
| 7393 | 2481 | UGAAAUGGGGgAUGGAaAU | 2.2% |
| 7394 | 2481 | UGAAAUGGGCgAUGGAuAU | 0.2% |
| 7395 | 2481 | UGAAAUGGGGAAUaGAGcU | 0.1% |
| 7396 | 2481 | UGAAAUGGGGcAUGGAaAU | 1.8% |
| 7397 | 2481 | UGAAgUGGGGUAUGGAaAU | 0.1% |
| 2482 | 2482 | AAUGCGGAAUGGAGAUGAG | 93.3% |
| 7398 | 2482 | AAUGCGGgAUGGAGAUGAG | 1.2% |
| 7399 | 2482 | AAUGGGGAAUGGAaAUGAG | 0.6% |
| 7400 | 2482 | AAUGGGGAAUGGAGcUGAG | 0.4% |
| 7401 | 2482 | AAUGGGGgAUGGAaAUGAG | 2.2% |
| 7402 | 2482 | AAUGGGGgAUGGAuAUGAG | 0.2% |
| 7403 | 2482 | AAUGCGGAAUaGAGCUGAG | 0.1% |
| 7404 | 2482 | AAUGGCGcAUGGAaAUGAG | 1.8% |
| 7405 | 2482 | AgUGGGGuAUGGAaAUGAG | 0.1% |
| 2483 | 2483 | CACAUUUUCUCAUUCACUG | 93.3% |
| 7406 | 2483 | CACAUUUUCUCgUUCACUG | 0.7% |
| 7407 | 2483 | CACAUUUUuUCAUUCACUG | 1.1% |
| 7408 | 2483 | CACAUUUUCUCgUUuACUG | 0.1% |
| 7409 | 2483 | CACAUcUUCUCAUUCACUG | 2.3% |
| 7410 | 2483 | CACAUUUUCUCAUUCACcG | 0.1% |
| 7411 | 2483 | CACAUUUUCUCAUUCACUa | 0.1% |
| 7412 | 2483 | CACAUUUUCUCcUUCACUG | 0.1% |
| 7413 | 2483 | CACAUcUUuUCAUUCACUG | 0.3% |
| 7414 | 2483 | CACAUaUUCUCAUUCACaG | 1.7% |
| 7415 | 2483 | CACAUaUUCUCAUUCACgG | 0.1% |
| 2484 | 2484 | AAAUGGGGAAUGGAGAUGA | 93.3% |
| 7416 | 2484 | AAAUGGGGgAUGGAGAUGA | 1.2% |
| 7417 | 2484 | AAAUGGGGAAUGGAaAUGA | 0.6% |
| 7418 | 2484 | AAAUGGGGAAUGGAGcUGA | 0.4% |
| 7419 | 2484 | AAAUGGGGgAUGGAaAUGA | 2.2% |
| 7420 | 2484 | AAAUGGGGgAUGGAuAUGA | 0.2% |
| 7421 | 2484 | AAAUGGGGAAUaGAGcUGA | 0.1% |
| 7422 | 2484 | AAAUGGGGcAUGGAaAUGA | 1.8% |
| 7423 | 2484 | AAgUGGGGuAUGGAaAUGA | 0.1% |
| 2485 | 2485 | GAAAUGGGGAAUGGAGAUG | 93.3% |
| 7424 | 2485 | GAAAUGGGGgAUGGAGAUG | 1.2% |
| 7425 | 2485 | GAAAUGGGGAAUGGAaAUG | 0.6% |
| 7426 | 2485 | GAAAUGGGGAAUGGAGcUG | 0.4% |
| 7427 | 2485 | GAAAUGGGGgAUGGAaAUG | 2.2% |
| 7428 | 2485 | GAAAUGGGGgAUGGAuAUG | 0.2% |
| 7429 | 2485 | GAAAUGGGGAAUaGAGcUG | 0.1% |
| 7430 | 2485 | GAAAUGGGGcAUGGAaAUG | 1.8% |
| 7431 | 2485 | GAAgUGGGGuAUGGAaAUG | 0.1% |
| 2486 | 2486 | AUGAAAUGGGGAAUGGAGA | 93.3% |
| 7432 | 2486 | AUGAAAUGGGGgAUGGAGA | 1.2% |
| 7433 | 2486 | AUGAAAUGGGGAAUGGAaA | 0.6% |
| 7434 | 2486 | AUGAAAUGGGGAAUGGAGc | 0.4% |
| 7435 | 2486 | AUGAAAUGGGGgAUGGAaA | 2.2% |
| 7436 | 2486 | AUGAAAUGGGGgAUGGAuA | 0.2% |
| 7437 | 2486 | AUGAAAUGGGGAAUaGAGc | 0.1% |
| 7438 | 2486 | AUGAAAUGGGGcAUGGAaA | 1.8% |
| 7439 | 2486 | AUGAAgUGGCGuAUGCAaA | 0.1% |
| 2487 | 2487 | ACAUUUUCUCAUUGACUGG | 93.2% |
| 7440 | 2487 | ACAUUUUCUCgUUCACUGG | 0.7% |
| 7441 | 2487 | ACAUUUUuUCAUUCACUGG | 1.1% |
| 7442 | 2487 | ACAUUUUCUCgUUuACUGG | 0.1% |
| 7443 | 2487 | AcAUcUUCUCAUUCACUGG | 2.3% |
| 7444 | 2487 | ACAUUUUCUCAUUCACcGG | 0.1% |
| 7445 | 2487 | ACAUUUUCUCAUUCACUaG | 0.1% |
| 7446 | 2487 | ACAUUUUCUCAUUCACUGa | 0.1% |
| 7447 | 2487 | ACAUUUUCUCcUUCACUGG | 0.1% |
| 7443 | 2487 | ACAUcUUuUcAUUCACUGG | 0.3% |
| 7449 | 2487 | ACAUaUUCUCAUUCACaGG | 1.7% |
| 7450 | 2487 | ACAUaUUCUCAUUCACgGG | 0.1% |
| 2488 | 2488 | AAAGAGGCGAAGAAACAAU | 92.8% |
| 7451 | 2488 | AAAGAGGCGAAGAgACAAU | 1.2% |
| 7452 | 2488 | AAAGAGGCGAgGAAACAAU | 0.2% |
| 7453 | 2488 | AgAGAGGCGAAGAAACAAU | 1.2% |
| 7454 | 2488 | AgAGAGGCGAAGAgACAAU | 4.2% |
| 7455 | 2488 | AAAGAGGCGAAaAAACAAU | 0.1% |
| 7456 | 2488 | AgAGAGGCGAAGAAACnAU | 0.1% |
| 7457 | 2488 | AgAGAGGaGAAGAgACAAU | 0.3% |
| 2489 | 2489 | GAAAGAGGCGAAGAAACAA | 92.8% |
| 7458 | 2489 | GAAAGAGGCGAAGAgACAA | 1.2% |
| 7459 | 2489 | GAAAGAGGCGAgGAAACAA | 0.2% |
| 7460 | 2489 | CAgAGAGGCGAAGAAACAA | 1.2% |
| 7461 | 2489 | GAgAGAGGCGAAGAgACAA | 4.2% |
| 7462 | 2489 | GAAAGAGGCGAAaAAACAA | 0.1% |
| 7463 | 2489 | GAgAGAGGCGAAGAAACnA | 0.1% |
| 7464 | 2489 | GAgAGAGGaGAAGAgACAA | 0.3% |
| 2490 | 2490 | AAUGAAAUGGGGAAUGGAG | 92.8% |
| 7465 | 2490 | AAUGAAAUGGGGgAUGGAG | 1.2% |
| 7466 | 2490 | gAUGAAAUGGGGAAUGGAG | 1.0% |
| 7467 | 2490 | AAUGAAAUGGGGAAUaGAG | 0.1% |
| 7468 | 2490 | AAUGAAAUGGGGAAUGGAa | 0.6% |
| 7469 | 2490 | AAUGAAAUGGGGgAUGGAa | 0.2% |
| 7470 | 2490 | gAUGAAAUGGGGgAUGGAa | 2.0% |
| 7471 | 2490 | gAUGAAAUGGGGgAUGGAu | 0.2% |
| 7472 | 2490 | AAUGAAAUGGGGcAUGGAa | 1.8% |
| 7473 | 2490 | AAUGAAgUGGGGuAUGGAa | 0.1% |
| 2491 | 2491 | UAAACUUUGUGAGCAUGGA | 92.5% |
| 7474 | 2491 | UAAAUUUUGUGAGCAUGGA | 3.2% |
| 7475 | 2491 | UAAAuUUUGUGAGUAUGGA | 1.7% |
| 7476 | 2491 | UgAACUUUGUGAGuAUGGA | 2.2% |
| 7477 | 2491 | UAAAGUUUaUGAGCAUGGA | 0.1% |
| 7478 | 2491 | UAAAuUUUGUaAGuAUGGA | 0.2% |
| 2492 | 2492 | AAGAGGCGAAGAAACAAUU | 92.5% |
| 7479 | 2492 | AAGAGGCGAAGAgACAAUU | 1.2% |
| 7480 | 2492 | AAGAGGCGAgGAAACAAUU | 0.2% |
| 7481 | 2492 | gAGAGGCGAAGAAACAAUU | 1.2% |
| 7482 | 2492 | gAGAGGCGAAGAgACAAUU | 4.2% |
| 7483 | 2492 | AAGAGGCGAAaAAACAAUU | 0.1% |
| 7484 | 2492 | AAGAGCCGAAGAAACAAUc | 0.2% |
| 7485 | 2492 | gAGAGGCGAAGAAACnAUU | 0.1% |
| 7486 | 2492 | gAGAGGaGAAGAgACAAUU | 0.3% |
| 2493 | 2493 | GUAAACUUUGUGAGCAUGG | 92.5% |
| 7487 | 2493 | GUAAAuUUUGUGAGCAUGG | 3.2% |
| 7488 | 2493 | GUAAAuUUUGUGAGuAUGG | 1.7% |
| 7489 | 2493 | GUgAACUUUGUGAGuAUGG | 2.2% |
| 7490 | 2493 | GUAAACUUUaUGAGCAUGG | 0.1% |
| 7491 | 2493 | GUAAAuUUUGUaAGuAUGG | 0.2% |
| 2494 | 2494 | CAGUCCGAAAGAGGCGAAG | 92.5% |
| 7492 | 2494 | CAGUCCGAAAGAGGCGAgG | 0.2% |
| 7493 | 2494 | CAGUCCGAgAGAGGCGAAG | 3.7% |
| 7494 | 2494 | CAGUCuGAAAGAGGCGAAG | 0.2% |
| 7495 | 2494 | CAaUCCGAAAGAGGCGAAG | 1.0% |
| 7496 | 2494 | CAGUCaGAAAGAGGCGAAG | 0.1% |
| 7497 | 2494 | CAGUCCGAAAGAGGCGAAa | 0.1% |
| 7498 | 2494 | CuGUCCGAAAGAGGCGAAG | 0.1% |
| 7499 | 2494 | CAaUCCGAgAGAGGCGAAG | 1.7% |
| 7500 | 2494 | CAGUCCGAgAGAGGaGAAG | 0.3% |
| 2495 | 2495 | AGUCCGAAAGAGGCGAAGA | 92.5% |
| 7501 | 2495 | AGUCCGAAAGAGGCGAgGA | 0.2% |
| 7502 | 2495 | AGUCCGAgAGAGGCGAAGA | 3.7% |
| 7503 | 2495 | AGUCuGAAAGAGGCGAAGA | 0.2% |
| 7504 | 2495 | AaUCCGAAAGAGGCGAAGA | 1.0% |
| 7505 | 2495 | AGUCaGAAAGAGGCGAAGA | 0.1% |
| 7506 | 2495 | AGUCCGAAAGAGGCGAAaA | 0.1% |
| 7507 | 2495 | uGUCCGAAAGAGGCGAAGA | 0.1% |
| 7508 | 2495 | AaUCCGAgAGAGGCGAAGA | 1.7% |
| 7509 | 2495 | AGUCCGAgAGAGGaGAAGA | 0.3% |
| 2496 | 2496 | CGAAAGAGGCGAAGAAACA | 92.4% |
| 7510 | 2496 | CGAAAGAGGCGAAGAgACA | 1.2% |
| 7511 | 2496 | CGAAAGAGGCGAgGAAACA | 0.2% |
| 7512 | 2496 | CGAgAGAGGCGAAGAAACA | 1.2% |
| 7513 | 2496 | uGAAAGAGGCGAAGAAACA | 0.2% |
| 7514 | 2496 | CGAgAGAGGCGAAGAgACA | 4.2% |
| 7515 | 2496 | aGAAAGAGGCGAAGAAACA | 0.1% |
| 7516 | 2496 | CGAAAGAGGCGAAaAAACA | 0.1% |
| 7517 | 2496 | CGAgAGAGGCGAAGAAACn | 0.1% |
| 7518 | 2496 | CGAgAGAGGaGAAGAgACA | 0.3% |
| 2497 | 2497 | UGGUAAACUUUGUGAGCAU | 92.4% |
| 7519 | 2497 | UGGUAAAuUUUGUGAGCAU | 3.0% |
| 7520 | 2497 | UGGUAAAuUUUGUGAGuAU | 1.7% |
| 7521 | 2497 | UGGUgAACUUUGUGAGuAU | 2.2% |
| 7522 | 2497 | UGGUAAACUUUaUCAGCAU | 0.1% |
| 7523 | 2497 | UuGUAAACUUUGUGAGCAU | 0.1% |
| 7524 | 2497 | UaGUAAAuUUUGUGAGCAU | 0.2% |
| 7525 | 2497 | UGGUAAAuUUUGUaAGuAU | 0.2% |
| 2498 | 2498 | GUGGUAAACUUUGUGAGCA | 92.4% |
| 7526 | 2498 | GUGGUAAAuUUUGUGAGCA | 3.0% |
| 7527 | 2498 | GUGGUAAAuUUUGUGAGuA | 1.7% |
| 7528 | 2498 | GUGGUgAACUUUGUGAGuA | 2.2% |
| 7529 | 2498 | GUGGUAAACUUUaUGAGCA | 0.1% |
| 7530 | 2498 | GUuGUAAACUUUGUGAGCA | 0.1% |
| 7531 | 2498 | GUaGUAAAUUUUGUGAGCA | 0.2% |
| 7532 | 2498 | GUGGUAAAuUUUCUaAGUA | 0.2% |
| 2499 | 2499 | UUUGUGCGACAAUGCUUCA | 92.4% |
| 7533 | 2499 | UUUGUGCGAGAAUGCUUuA | 0.5% |
| 7534 | 2499 | UUUGUGCGACAAUGuUUCA | 2.8% |
| 7535 | 2499 | UUUGUGCGACAgUGCUUCA | 1.2% |
| 7536 | 2499 | UUUGUGCGgCAAUGCUUCA | 0.2% |
| 7537 | 2499 | UgUGUGCGACAAUGCUUCA | 0.1% |
| 7538 | 2499 | UUcGUGCGACAAUGCUUCA | 0.1% |
| 7539 | 2499 | UUUGUGaGACAAUGCUUCA | 0.2% |
| 7540 | 2499 | UUUGUGCGACAAUGCUUCu | 0.1% |
| 7541 | 2499 | UUUGUGgGACAAUGCUUCA | 0.1% |
| 7542 | 2499 | UUUGUaCGACAAUGCUUuA | 1.6% |
| 2500 | 2500 | UCGUCAGUCCGAAAGAGGC | 92.4% |
| 7543 | 2500 | UCGUCAGUCCGAgAGAGGC | 3.7% |
| 7544 | 2500 | UCGUCAGUCuGAAAGAGGC | 0.2% |
| 7545 | 2500 | UCaUCAGUCCGAAAGAGGC | 0.2% |
| 7546 | 2500 | UCGcCAGUCCGAAAGAGGC | 0.2% |
| 7547 | 2500 | UCGUCAaUCCGAAAGAGCC | 1.0% |
| 7548 | 2500 | UCGUCAGUCaGAAAGAGGC | 0.1% |
| 7549 | 2500 | UCGUCuGUCCGAAAGAGGC | 0.1% |
| 7550 | 2500 | UCGUCAaUCCGAgAGAGGC | 1.7% |
| 7551 | 2500 | UCGUCAGUCCGAgAGAGGa | 0.3% |
| 2501 | 2501 | UUGUGCGACAAUGCUUCAA | 92.4% |
| 7552 | 2501 | UUGUGCGACAAUGCUUuAA | 0.5% |
| 7553 | 2501 | UUGUGCGACAAUGuUUCAA | 2.8% |
| 7554 | 2501 | UUGUGCGACAgUGCUUCAA | 1.2% |
| 7555 | 2501 | UUGUGCGgCAAUGCUUCAA | 0.2% |
| 7556 | 2501 | gUGUGCGACAAUGCUUCAA | 0.1% |
| 7557 | 2501 | UcGUGCGACAAUGCUUCAA | 0.1% |
| 7558 | 2501 | UUGUGaGACAAUGCCUCAA | 0.2% |
| 7559 | 2501 | UUGUGCGACAAUGCUUCuA | 0.1% |
| 7560 | 2501 | UUGUGgGACAAUGCUUCAA | 0.1% |
| 7561 | 2501 | UUGUaCGACAAUGCUUuAA | 1.6% |
| 2502 | 2502 | UAAGCGAUUUGAAGCAAUA | 92.4% |
| 7562 | 2502 | UAAGCGAUUUGAAGCAgUA | 0.4% |
| 7563 | 2502 | UAAGuGAUUUGAAGCAAUA | 0.3% |
| 7564 | 2502 | UAgGCGAUUUGAAGCAAUA | 0.3% |
| 7565 | 2502 | UgAGCGAUUUGAAGCAAUA | 0.1% |
| 7566 | 2502 | UAgGuGAUUUGAAGCAAUA | 0.3% |
| 7567 | 2502 | cAAGCGAUUUGAAGCAAUA | 0.2% |
| 7568 | 2502 | UAAGCGAcUUGAAGCAAUA | 0.2% |
| 7569 | 2502 | UAAGCGAUcUGAAGCAAUA | 0.3% |
| 7570 | 2502 | UAAGCGAUUUaAAGCAAUA | 0.3% |
| 7571 | 2502 | UAAGCGAUUUGAAaCAAUA | 0.2% |
| 7572 | 2502 | UuAGCGAUUUGAAGCAAUA | 0.2% |
| 7573 | 2502 | UAgGCGAcUUGAAGCAAUA | 0.3% |
| 7574 | 2502 | UcAGCGAUUUaAAGCAAUA | 0.1% |
| 2503 | 2503 | UUCGUCAGUCCGAAAGAGG | 92.4% |
| 7575 | 2503 | UUCGUCAGUCCGAgAGAGG | 4.1% |
| 7576 | 2503 | UUCGUCAGUCuGAAAGAGG | 0.2% |
| 7577 | 2503 | UUCaUCAGUCCGAAAGAGG | 0.2% |
| 7578 | 2503 | UUCGcCAGUCCGAAAGAGG | 0.2% |
| 7579 | 2503 | UUCGUCAaUCCGAAAGAGG | 1.0% |
| 7580 | 2503 | UUCGUCAGUCaGAAACAGG | 0.1% |
| 7581 | 2503 | UUCGUCuGUCCGAAAGAGG | 0.1% |
| 7582 | 2503 | UUCGUcAaUCCGAgAGAGG | 1.7% |
| 2504 | 2504 | CGUCAGUCCGAAAGAGGCG | 92.4% |
| 7583 | 2504 | CGUCAGUCCGAgAGAGGCG | 3.7% |
| 7584 | 2504 | CGUCAGUCuGAAAGAGGCG | 0.2% |
| 7585 | 2504 | CaUCAGUCCGAAAGAGGCG | 0.2% |
| 7586 | 2504 | CGcCAGUCCGAAAGAGGCG | 0.2% |
| 7587 | 2504 | CGUCAaUCCGAAAGAGGCG | 1.0% |
| 7588 | 2504 | CGUCAGUCaGAAAGAGGCG | 0.1% |
| 7589 | 2504 | CGUCuGUCCGAAAGAGGCG | 0.1% |
| 7590 | 2504 | CGUCAaUCCGAgAGAGGCG | 1.7% |
| 7591 | 2504 | CGUCAGUCCGAgAGAGGaG | 0.3% |
| 2505 | 2505 | GUCAGUCCGAAAGAGGCGA | 92.4% |
| 7592 | 2505 | GUCAGUCCGAgAGAGGCGA | 3.7% |
| 7593 | 2505 | GUCAGUCuGAAAGAGGCGA | 0.2% |
| 7594 | 2505 | aUCAGUCCGAAAGAGGCGA | 0.2% |
| 7595 | 2505 | GcCAGUCCGAAAGAGGCGA | 0.2% |
| 7596 | 2505 | GUCAaUCCGAAAGAGGCGA | 1.0% |
| 7597 | 2505 | GUCAGUCaGAAAGAGGCGA | 0.1% |
| 7598 | 2505 | GUCuGUCCGAAAGAGGCGA | 0.1% |
| 7599 | 2505 | GUcAaUCCGAgAGAGGCGA | 1.7% |
| 7600 | 2505 | GUCAGUCCGAgAGAGGaGA | 0.3% |
| 2506 | 2506 | UCAGUCCGAAAGAGGCGAA | 92.4% |
| 7601 | 2506 | UCAGUCCGAAAGAGGCGAg | 0.2% |
| 7602 | 2506 | UCAGUCCGAgAGAGGCGAA | 3.7% |
| 7603 | 2506 | UCAGUCuGAAAGACGCGAA | 0.2% |
| 7604 | 2506 | cCAGUCCGAAAGAGGCGAA | 0.2% |
| 7605 | 2506 | UCAaUCCGAAAGAGGCGAA | 1.0% |
| 7606 | 2506 | UCAGUCaGAAAGAGGCGAA | 0.1% |
| 7607 | 2506 | UCuGUCCGAAAGAGGCGAA | 0.1% |
| 7608 | 2506 | UCAaUCCGAgAGAGGCGAA | 1.7% |
| 7609 | 2506 | UCAGUCCGAgAGAGGaGAA | 0.3% |
| 2507 | 2507 | GGUAAACUUUGUGAGCAUG | 92.4% |
| 7610 | 2507 | GGUAAAuUUUGUGAGCAUG | 3.0% |
| 7611 | 2507 | GGUAAAuUUUGUGAGuAUG | 1.7% |
| 7612 | 2507 | GGUgAACUUUGUGAGuAUG | 2.2% |
| 7613 | 2507 | GGUAAACUUUaUGAGCAUG | 0.1% |
| 7614 | 2507 | uGUAAACUUUGUGAGCAUG | 0.1% |
| 7615 | 2507 | aGUAAAuUUUGUGAGCAUG | 0.2% |
| 7616 | 2507 | GGUAAAuUUUGUaAGuAUG | 0.2% |
| 2508 | 2508 | UCCGAAAGAGGCGAAGAAA | 92.4% |
| 7617 | 2508 | UCCGAAAGAGGCGAAGAgA | 1.2% |
| 7618 | 2508 | UCCGAAAGAGGCGAgGAAA | 0.2% |
| 7619 | 2508 | UCCGAgAGAGGCGAAGAAA | 1.3% |
| 7620 | 2508 | UCuGAAAGAGGCGAAGAAA | 0.2% |
| 7621 | 2508 | UCCGAgAGAGGCGAAGAgA | 4.2% |
| 7622 | 2508 | UCaGAAAGAGGCGAAGAAA | 0.1% |
| 7623 | 2508 | UCCGAAAGAGGCGAAaAAA | 0.1% |
| 7624 | 2508 | UCCGAgAGAGGaGAAGAgA | 0.3% |
| 2509 | 2509 | CCGAAAGAGGCGAAGAAAC | 92.4% |
| 7625 | 2509 | CCGAAAGAGGCGAAGAgAC | 1.2% |
| 7626 | 2509 | CCGAAAGAGGCGAgGAAAC | 0.2% |
| 7627 | 2509 | CCGAgAGAGGCGAAGAAAC | 1.3% |
| 7628 | 2509 | CuGAAAGAGGCGAAGAAAC | 0.2% |
| 7629 | 2509 | CCGAgAGAGGCGAAGAgAC | 4.2% |
| 7630 | 2509 | CaGAAAGAGGCGAAGAAAC | 0.1% |
| 7631 | 2509 | CCGAAAGAGGCGAAaAAAC | 0.1% |
| 7632 | 2509 | CCGAgAGAGGaGAAGAgAC | 0.3% |
| 2510 | 2510 | UUUCGUCAGUCCGAAAGAG | 92.4% |
| 7633 | 2510 | UUUCGUCAGUCCGAgAGAG | 4.1% |
| 7634 | 2510 | UUUCGUCAGUCuGAAAGAG | 0.2% |
| 7635 | 2510 | UUUCaUCAGUCCGAAAGAG | 0.2% |
| 7636 | 2510 | UUUCGcCAGUCCGAAAGAG | 0.2% |
| 7637 | 2510 | UUUCGUCAaUCCGAAAGAG | 1.0% |
| 7638 | 2510 | UUUCGUCAGUCaGAAAGAG | 0.1% |
| 7639 | 2510 | UUUCGUCuGUCCGAAAGAG | 0.1% |
| 7640 | 2510 | UUUCGUCAaUCCGAgAGAG | 1.7% |
| 2511 | 2511 | UCCUUUCGUCAGUCCGAAA | 92.3% |
| 7641 | 2511 | UCCUUUCGUCAGUCCGAgA | 4.1% |
| 7642 | 2511 | UCGUUUCGUCAGUCuGAAA | 0.2% |
| 7643 | 2511 | UCuUUUCGUCAGUCCGAAA | 0.1% |
| 7644 | 2511 | UCCUUUCaUCAGUCCGAAA | 0.2% |
| 7645 | 2511 | UCCUUUCGcCAGUCCGAAA | 0.2% |
| 7646 | 2511 | UCCUUUCGUCAaUCCGAAA | 1.0% |
| 7647 | 2511 | UCCUUUCGUCAGUCaGAAA | 0.1% |
| 7648 | 2511 | UCCUUUCGUCuGUCCGAAA | 0.1% |
| 7649 | 2511 | UCCUUUCGUCAaUCCGAgA | 1.7% |
| 2512 | 2512 | CCUUUCGUCAGUCCGAAAG | 92.3% |
| 7650 | 2512 | CCUUUCGUCAGUCCGAgAG | 4.1% |
| 7651 | 2512 | CCUUUCGUCAGUCuGAAAG | 0.2% |
| 7652 | 2512 | CuUUUCGUCAGUCCGAAAG | 0.1% |
| 7653 | 2512 | CCUUUCaUCAGUCCGAAAG | 0.2% |
| 7654 | 2512 | CCUUUCGcCAGUCCGAAAG | 0.2% |
| 7655 | 2512 | CCUUUCGUCAaUCCGAAAG | 1.0% |
| 7656 | 2512 | CCUUUCGUCAGUCaGAAAG | 0.1% |
| 7657 | 2512 | CCUUUCGUCuGUCCGAAAG | 0.1% |
| 7658 | 2512 | CCUUUCGUCAaUCCGAgAG | 1.7% |
| 2513 | 2513 | GCGAUUUGAAGCAAUAUGA | 92.3% |
| 7659 | 2513 | GCGAUUUGAAGCAgUAUGA | 0.4% |
| 7660 | 2513 | GuGAUUUGAAGCAAUAUGA | 0.6% |
| 7661 | 2513 | GCGAcUUGAAGCAAUAUGA | 0.4% |
| 7662 | 2513 | GCGAUcUGAAGCAAUAUGA | 0.3% |
| 7663 | 2513 | GCGAUUUaAAGCAAUAUGA | 0.4% |
| 7664 | 2513 | GCGAUUUGAAaCAAUAUGA | 0.2% |
| 7665 | 2513 | GCGAUUUGAAGCAAUACGA | 0.5% |
| 7666 | 2513 | GCGAUUUGAAGCAAUAUaA | 0.4% |
| 7667 | 2513 | GCGAcUUGAAGCAAUAUuA | 0.1% |
| 2514 | 2514 | CUUUCGUCAGUCCGAAAGA | 92.3% |
| 7668 | 2514 | CUUUCGUCAGUCCGAgAGA | 4.1% |
| 7669 | 2514 | CUUUCGUCAGUCuGAAAGA | 0.2% |
| 7670 | 2514 | uUUUCGUCAGUCCGAAAGA | 0.1% |
| 7671 | 2514 | CUUUCaUCAGUCCGAAAGA | 0.2% |
| 7672 | 2514 | CUUUCGcCAGUCCGAAAGA | 0.2% |
| 7673 | 2514 | CUUUCGUCAaUCCGAAAGA | 1.0% |
| 7674 | 2514 | CUUUCGUCAGUCaGAAAGA | 0.1% |
| 7675 | 2514 | CUUUCGUCuGUCCGAAAGA | 0.1% |
| 7676 | 2514 | CUUUCGUCAaUCCGAgAGA | 1.7% |
| 2515 | 2515 | AAGCGAUUUGAAGCAAUAU | 92.1% |
| 7677 | 2515 | AAGCGAUUUGAACCAgUAU | 0.4% |
| 7678 | 2515 | AAGuGAUUUGAAGCAAUAU | 0.3% |
| 7679 | 2515 | AgGCGAUUUGAAGCAAUAU | 0.3% |
| 7680 | 2115 | gAGCGAUUUGAAGCAAUAU | 0.1% |
| 7681 | 2515 | AgGuGAUUUGAAGCAAUAU | 0.3% |
| 7682 | 2515 | AAGCGAcUUGAAGCAAUAU | 0.2% |
| 7683 | 2515 | AAGCGAUcUGAAGCAAUAU | 0.3% |
| 7684 | 2515 | AAGCGAUUUaAAGCAAUAU | 0.3% |
| 7685 | 2515 | AAGCGAUUUGAAaCAAUAU | 0.2% |
| 7686 | 2515 | AAGCGAUUUGAAGCAAUAc | 0.5% |
| 7687 | 2515 | uAGCGAUUUGAAGCAAUAU | 0.2% |
| 7688 | 2515 | AgGCGAcUUGAAGCAAUAU | 0.3% |
| 7689 | 2515 | cAGCGAUUUaAAGCAAUAU | 0.1% |
| 2516 | 2516 | AAGAUUUUGUGCGACAAUG | 92.0% |
| 7690 | 2516 | AAGAUUUUGUGCGACAgUG | 0.9% |
| 7691 | 2516 | AAGAUUUUGUGCGgCAAUG | 0.2% |
| 7692 | 2516 | AgGAUUUUGUGCGACAAUG | 0.2% |
| 7693 | 2516 | AAGAaUUUGUGCGACAAUG | 0.3% |
| 7694 | 2516 | AAGAcUUUGUGCGACAAUG | 3.1% |
| 7695 | 2516 | AAGAUUUcGUGCGACAAUG | 0.1% |
| 7696 | 2516 | AAGAUUUUGUaCGACAAUG | 1.6% |
| 7697 | 2516 | AAGAUUUUGUGaGACAAUG | 0.1% |
| 7698 | 2516 | AAGAUUUUGUGgGACAAUG | 0.1% |
| 7699 | 2516 | AAGACUUUGUGCGACAgUG | 0.3% |
| 7700 | 2516 | AAGAcUgUGUGCGACAAUG | 0.1% |
| 7701 | 2516 | AAGAUUUUGaGgGACAAUG | 0.1% |
| 2517 | 2517 | AGCGAUUUGAAGCAAUAUG | 92.0% |
| 7702 | 2517 | AGCGAUUUGAAGCAgUAUG | 0.4% |
| 7703 | 2517 | AGuGAUUUGAAGCAAUAUG | 0.3% |
| 7704 | 2517 | gGCGAUUUGAAGCAAUAUG | 0.3% |
| 7705 | 2517 | gGUGAUUUGAAGCAAUAUG | 0.3% |
| 7706 | 2517 | AGCGACUUGAAGCAAUAUG | 0.1% |
| 7707 | 2517 | AGCGAUcUGAAGCAAUAUG | 0.3% |
| 7708 | 2517 | AGCGAUUUaAAGCAAUAUG | 0.4% |
| 7709 | 2517 | AGCGAUUUGAAaCAAUAUG | 0.2% |
| 7710 | 2517 | AGCGAUUUGAAGCAAUAcG | 0.5% |
| 7711 | 2517 | AGCGAUUUGAAGCAAUAUa | 0.4% |
| 7712 | 2517 | gGCGACUUGAAGCAAUAUG | 0.3% |
| 7713 | 2517 | AGCGAcUUGAAGGAAUAUu | 0.1% |
| 2518 | 2518 | GUCCGAAAGAGGCGAAGAA | 91.8% |
| 7714 | 2518 | GUCCGAAAGAGGCGAAGAg | 0.9% |
| 7715 | 2518 | GUCCGAAAGAGGCGAgGAA | 0.2% |
| 7716 | 2518 | GUCCGAgAGAGGCGAACAA | 1.3% |
| 7717 | 2518 | GUCuGAAAGAGGCGAAGAA | 0.2% |
| 7718 | 2518 | GUCCGAgAGAGGCGAAGAg | 2.5% |
| 7719 | 2518 | aUCCGAAAGAGGCGAAGAA | 0.6% |
| 7720 | 2518 | GUCaGAAAGAGGCGAAGAA | 0.1% |
| 7721 | 2518 | GUCCGAAAGAGGCGAAaAA | 0.1% |
| 7722 | 2518 | aUCCGAAAGAGGCGAAGAg | 0.3% |
| 7723 | 2518 | aUCCGAgAGAGGCGAAGAg | 1.7% |
| 7724 | 2518 | GUCCGAgAGAGGaGAAGAg | 0.3% |
| 2519 | 2519 | GGCAAGCUUUCUCAAAUGU | 91.5% |
| 7725 | 2519 | GGCAAGCUUUCUCAgAUGU | 0.1% |
| 7726 | 2519 | GGuAAGCUUUCUCAAAUGU | 0.1% |
| 7727 | 2519 | GGCAAaCUUUCUCAAAUGU | 0.2% |
| 7728 | 2519 | GGCAAGCUgUCUCAAAUGU | 0.3% |
| 7729 | 2519 | GGCAAGCUUUCaCAAAUGU | 7.7% |
| 7730 | 2519 | GGuAAGCUUUCaCAAAUGU | 0.1% |
| 2520 | 2520 | ACAUUCUUUGGAUGGAAAG | 91.3% |
| 7731 | 2520 | ACAUUCUUUGGAUGGAAgG | 1.1% |
| 7732 | 2520 | ACAUUCUUUGGgUGGAAAG | 0.1% |
| 7733 | 2520 | ACAUUuUUUGGAUGGAAAG | 2.3% |
| 7734 | 2520 | ACgUUCUUUGGAUGGAAAG | 0.6% |
| 7735 | 2520 | ACAUUCUUUGGgUGGAAgG | 0.1% |
| 7736 | 2520 | ACAUUcUUCGGAUGGAAAG | 0.1% |
| 7737 | 2520 | ACAUUCUUUGGAUGGAAga | 0.2% |
| 7738 | 2520 | ACAUUCUUUGGcUGGAgAG | 2.0% |
| 7739 | 2520 | ACAUUuUUcGGAUGGAAAG | 0.1% |
| 7740 | 2520 | ACAUUCUUcGGcUGGAgAG | 0.2% |
| 7741 | 2520 | ACAUUuUUcGGcUGGAAAG | 1.6% |
| 7742 | 2520 | ACAUUuUUcGGuUGGAAAG | 0.1% |
| 2521 | 2521 | CAUUCUUUGGAUGGAAAGA | 91.3% |
| 7743 | 2521 | CAUUCUUUGGAUGGAAgGA | 1.1% |
| 7744 | 2521 | CAUUCUUUGGgUGGAAAGA | 0.1% |
| 7745 | 2521 | CAUUuUUUGGAUGGAAAGA | 2.3% |
| 7746 | 2521 | CgUUCUUUGGAUGGAAAGA | 0.6% |
| 7747 | 2521 | CAUUCUUUGGgUGGAAgGA | 0.1% |
| 7748 | 2521 | CAUUCUUcGGAUGGAAAGA | 0.1% |
| 7749 | 2521 | CAUUCUUUGGAUGGAAgaA | 0.2% |
| 7750 | 2521 | CAUUCUUUGGcUGGAgAGA | 2.0% |
| 7751 | 2521 | CAUUuUUcGGAUGGAAAGA | 0.1% |
| 7752 | 2521 | CAUUCUUcGGcUGGAgAGA | 0.2% |
| 7753 | 2521 | CAUUuUUcGGcUGGAAAGA | 1.6% |
| 7754 | 2521 | CAUUuUUcGGuUGGAAAGA | 0.1% |
| 2522 | 2522 | GAUUUGAAGCAAUAUGAUA | 91.2% |
| 7755 | 2522 | GAUUUGAAGCAgUAUGAUA | 0.4% |
| 7756 | 2522 | GAcUUGAAGCAAUAUGAUA | 0.4% |
| 7757 | 2522 | GAUcUGAAGCAAUAUGAUA | 0.3% |
| 7758 | 2522 | GAUUUaAAGCAAUAUGAUA | 0.4% |
| 7759 | 2522 | GAUUUGAAaCAAUAUGAUA | 0.2% |
| 7760 | 2522 | GAUUUGAAGCAAUAcGAUA | 0.5% |
| 7761 | 2522 | GAUUUGAAGCAAUAUaAUA | 0.4% |
| 7762 | 2522 | GAUUUGAAGCAAUAUGAcA | 1.8% |
| 7763 | 2522 | GAcUUGAAGCAAUAUuAUA | 0.1% |
| 2523 | 2523 | AGGGCAAGCUUUCUCAAAU | 91.2% |
| 7764 | 2523 | AGGGCAAGCUUUCUCAgAU | 0.1% |
| 7765 | 2523 | AGGGuAAGCUUUCUCAAAU | 0.1% |
| 7766 | 2523 | AaGGCAAGCUUUCUCAAAU | 0.3% |
| 7767 | 2523 | AGGGCAAaCUUUCUCAAAU | 0.2% |
| 7768 | 2523 | AGGGCAAGCUgUCUCAAAU | 0.3% |
| 7769 | 2523 | AGGGCAAGCUUUCaCAAAU | 7.7% |
| 7770 | 2523 | AGGGuAAGCUUUCaCAAAU | 0.1% |
| 2524 | 2524 | UUGAGGGCCAAGCUUCUCA | 91.2% |
| 7771 | 2524 | UUGAGGGuAAGCUUUCUGA | 0.1% |
| 7772 | 2524 | UaGAGGGCAAGCUUUCUCA | 0.1% |
| 7773 | 2524 | UUGAaGGCAAGCUUUCUCA | 0.3% |
| 7774 | 2524 | UUGAGGGCAAaCUUUCUCA | 0.2% |
| 7775 | 2524 | UUGAGGGCAAGCUgUCUCA | 0.3% |
| 7776 | 2524 | UUGAGGGCAAGCUUUCaCA | 7.7% |
| 7777 | 2524 | UUGAGGGuAAGCUUUCaCA | 0.1% |
| 2525 | 2525 | AUUUGAAGCAAUAUGAUAG | 91.2% |
| 7778 | 2525 | AUUUGAAGCAgUAUGAUAG | 0.4% |
| 7779 | 2525 | AcUUGAAGCAAUAUGAUAG | 0.4% |
| 7780 | 2525 | AUcUGAAGCAAUAUGAUAG | 0.3% |
| 7781 | 2525 | AUUUaAAGCAAUAUGAUAG | 0.4% |
| 7782 | 2525 | AUUUGAAaCAAUAUGAUAG | 0.2% |
| 7783 | 2525 | AUUUGAAGCAAUAcGAUAG | 0.5% |
| 7784 | 2525 | AUUUGAAGCAAUAUaAUAG | 0.4% |
| 7785 | 2525 | AUUUGAAGCAAUAUGAcAG | 1.8% |
| 7786 | 2525 | AcUUGAAGCAAUAUuAUAG | 0.1% |
| 2526 | 2526 | AUUGAGGGCAAGCUUUCUC | 91.2% |
| 7787 | 2526 | AUUGAGGGuAAGCUUUCUC | 0.1% |
| 7788 | 2526 | AUaGAGGGCAAGCUUUCUC | 0.1% |
| 7789 | 2526 | AUUGAaGGCAAGCUUUCUC | 0.3% |
| 7790 | 2526 | AUUGAGGGCAAaCUUUCUC | 0.2% |
| 7791 | 2526 | AUUGAGGGCAAGCUgUCUC | 0.3% |
| 7792 | 2526 | AUUGAGGGCAAGCUUUCaC | 7.7% |
| 7793 | 2526 | AUUGAGGGuAAGCUUUCaC | 0.1% |
| 2527 | 2527 | GAGGGCAAGCUUUCUCAAA | 91.2% |
| 7794 | 2527 | GAGGGCAAGCUUUCUCAgA | 0.1% |
| 7795 | 2527 | GAGGGuAAGCUUUCUCAAA | 0.1% |
| 7796 | 2527 | GAaGGCAAGCUUUCUCAAA | 0.3% |
| 7797 | 2527 | GAGGGCAAaCUUUCUCAAA | 0.2% |
| 7798 | 2527 | GAGGGCAAGCUgUCUCAAA | 0.3% |
| 7799 | 2527 | GAGGGGAAGCUUUCaCAAA | 7.7% |
| 7800 | 2S27 | GAGGGuAAGCUUUCaCAAA | 0.1% |
| 2528 | 2528 | GGGCAAGCUUUCUCAAAUG | 91.2% |
| 7801 | 2528 | GGGCAAGCUUUCUCAgAUG | 0.1% |
| 7802 | 2528 | GGGuAAGCUUUCUCAAAUG | 0.1% |
| 7803 | 2528 | aGGCAAGCUUUCUCAAAUG | 0.3% |
| 7804 | 2528 | GGGCAAaCUUUCUCAAAUG | 0.2% |
| 7805 | 2528 | GGGCAAGCUgUCUCAAAUG | 0.3% |
| 7806 | 2528 | GGGCAAGCUUUCaCAAAUG | 7.7% |
| 7807 | 2528 | GGGuAAGCUUUCaCAAAUG | 0.1% |
| 2529 | 2529 | CAUUGAGGGCAAGCGUUCU | 91.2% |
| 7808 | 2529 | CAUUGAGGGuAAGCUUUCU | 0.1% |
| 7809 | 2529 | CAUaGAGGGCAAGCUUUCU | 0.1% |
| 7810 | 2529 | CAUUGAaGGCAAGCUUUCU | 0.3% |
| 7811 | 2529 | CAUUGAGGGCAAaCUUUCU | 0.2% |
| 7812 | 2529 | CAUUGAGGGCAAGCUgUCU | 0.3% |
| 7813 | 2529 | CAUUGAGGGCAAGCUUUCa | 7.7% |
| 7814 | 2529 | CAUUGAGGGUAAGCUUUCa | 0.1% |
| 2530 | 2530 | GCAAGCUUUCUCAAAUGUC | 91.0% |
| 7815 | 2530 | GCAAGCUUUCUCAAAUGUu | 0.1% |
| 7816 | 2530 | GCAAGCUUUCUCAgAUGUC | 0.1% |
| 7817 | 2530 | GuAAGCUUUCUCAAAUGUC | 0.1% |
| 7818 | 2530 | GCAAaCUUUCUCAAAUGUC | 0.2% |
| 7819 | 2530 | GCAAGCUgUCUCAAAUGUC | 0.3% |
| 7820 | 2530 | GCAAGCUUUCaCAAAUGUC | 7.7% |
| 7821 | 2530 | GCAAGCUUUCUGAAAUGUa | 0.3% |
| 7822 | 2530 | GUAAGCUUUCaCAAAUGUC | 0.1% |
| 2531 | 2531 | UGAGGGCAAGCUUUCUCAA | 91.0% |
| 7823 | 2531 | UGAGGGCAAGCUUUCUCAg | 0.1% |
| 7824 | 2531 | UGAGGGuAAGCUUUCUCAA | 0.1% |
| 7825 | 2531 | aGAGGGCAAGCUUUCUCAA | 0.1% |
| 7826 | 2531 | UGAaGGCAAGCUUUCUCAA | 0.3% |
| 7827 | 2531 | UGAGGGCAAaCUUUCUCAA | 0.2% |
| 7828 | 2531 | UGAGGGCAAGCUgUCUCAA | 0.3% |
| 7829 | 2531 | UGAGGGCAAGCUUUCaCAA | 7.7% |
| 7830 | 2531 | UGAGGGuAAGCUUUCaCAA | 0.1% |
| 2532 | 2532 | CAGAAUGAGUUCAACAAGG | 91.0% |
| 7831 | 2532 | CAGAAUGAGUUCAAuAAGG | 0.2% |
| 7832 | 2532 | CAGAAUGAGUUuAACAAGG | 0.3% |
| 7833 | 2532 | CAGAgUGAGUUCAACAAGG | 1.5% |
| 7834 | 2532 | CAaAAUGAGUUCAACAAGG | 0.2% |
| 7835 | 2532 | CAGAAUGAaUUCAACAAGG | 3.3% |
| 7836 | 2532 | CAGAAUGAGUUCAACAAaG | 1.2% |
| 7837 | 2532 | CAGAuUGAGUUCAACAAGG | 0.1% |
| 7838 | 2532 | CAGAAUGgaUUCAACAAGG | 0.1% |
| 7839 | 2532 | CAGAgUGAaUUCAACAAGG | 2.0% |
| 2533 | 2533 | AGAAUGAGUUCAACAAGGC | 91.0% |
| 7840 | 2533 | AGAAUGAGUUCAAuAAGGC | 0.2% |
| 7841 | 2533 | AGAAUGAGUUuAACAAGGC | 0.3% |
| 7842 | 2533 | AGAgUGAGUUCAACAAGGC | 1.5% |
| 7843 | 2533 | AaAAUGAGUUCAACAAGGC | 0.2% |
| 7844 | 2533 | AGAAUGAaUUCAACAAGGC | 3.3% |
| 7845 | 2533 | AGAAUGAGUUCAACAAaGC | 1.2% |
| 7846 | 2533 | AGAuUGAGUUCAACAAGGC | 0.1% |
| 7847 | 2533 | AGAAUGgaUUCAACAACGC | 0.1% |
| 7848 | 2533 | AGAgUGAaUUCAACAAGGC | 2.0% |
| 2534 | 2534 | AUAAGGGAUUUGAAGCAAU | 90.7% |
| 7849 | 2534 | AUAAGCGAUUUGAAGCAgU | 0.4% |
| 7850 | 2534 | AUAAGuGAUUUGAAGCAAU | 0.3% |
| 7851 | 2534 | AUAgGCGAUUUGAAGCAAU | 0.2% |
| 7852 | 2534 | AUgAGCGAUUUGAAGCAAU | 0.1% |
| 7853 | 2534 | gUAAGCGAUUUGAAGCAAU | 1.7% |
| 7854 | 2534 | gUAgGCGAUUUGAAGCAAU | 0.1% |
| 7855 | 2534 | gUAgGuGAUUUGAAGCAAU | 0.3% |
| 7856 | 2534 | AcAAGCGAUUUGAAGCAAU | 0.2% |
| 7857 | 2534 | AUAAGCGAcUUGAAGCAAU | 0.1% |
| 7858 | 2534 | AUAAGCGAUUUaAAGCAAU | 0.3% |
| 7859 | 2534 | AUAAGCGAUUUGAAaCAAU | 0.2% |
| 7860 | 2534 | AUuAGCGAUUUGAAGCAAU | 0.2% |
| 7861 | 2534 | AUAgGCGAcUUGAAGCAAU | 0.3% |
| 7862 | 2534 | gUAAGCGAcUUGAAGCAAU | 0.1% |
| 7863 | 2534 | gUAAGCGAUcUGAAGCAAU | 0.3% |
| 7864 | 2534 | AUcAGCGAUUUaAAGCAAU | 0.1% |
| 2535 | 2535 | UUCUUUGGAUGGAAAGAAC | 90.5% |
| 7865 | 2535 | UUCUUUGGAUGGAAAGAgC | 1.4% |
| 7866 | 2535 | UUCUUUGGAUGGAAgGAAC | 1.1% |
| 7867 | 2535 | UUCUUUGGgUGGAAAGAAC | 0.1% |
| 7868 | 2535 | UUuUUUGGAUGGAAAGAAC | 2.3% |
| 7869 | 2535 | UUCUUUGGgUGGAAgGAAC | 0.1% |
| 7870 | 2535 | UUCUUcGGAUGGAAAGAAC | 0.1% |
| 7871 | 2535 | UUCUUUGGAUGGAAgaAAC | 0.2% |
| 7872 | 2535 | UUCUUUGGcUGGAgAGAgC | 2.0% |
| 7873 | 2535 | UUuUUcGGAUGGAAAGAgC | 0.1% |
| 7874 | 2535 | UUuUUcGGcUGGAAAGAAC | 0.7% |
| 2536 | 2536 | CGAUUUGAAGCAAUAUGAU | 90.5% |
| 7875 | 2536 | CGAUUUGAAGCAgUAUGAU | 0.4% |
| 7876 | 2536 | uGAUUUGAAGCAAUAUGAU | 0.6% |
| 7877 | 2536 | CGAcuUGAAGCAAUAUGAU | 0.4% |
| 7878 | 2536 | CGAUcUGAAGCAAUAUGAU | 0.3% |
| 7879 | 2536 | CGAUUUaAAGCAAUAUGAU | 0.4% |
| 7880 | 2536 | CGAUUUGAAaCAAUAUGAU | 0.2% |
| 7881 | 2536 | CGAUUUGAAGCAAUAcGAU | 0.5% |
| 7882 | 2536 | CGAUUUGAAGCAAUAUaAU | 0.4% |
| 7883 | 2536 | CGAUUUGAAGCAAUAUGAc | 1.8% |
| 7884 | 2536 | CGAcUUGAAGCAAUAUuAU | 0.1% |
| 2537 | 2537 | UCUUUGGAUGGAAAGAACC | 90.5% |
| 7885 | 2537 | UCUUUGGAUGGAAAGAgCC | 1.4% |
| 7886 | 2537 | UCUUUGGAUGGAAgGAACC | 1.1% |
| 7887 | 2537 | UCUUUGGgUGGAAAGAACC | 0.1% |
| 7888 | 2537 | UuUUUGGAUGGAAAGAACC | 2.3% |
| 7889 | 2537 | UCUUUGGgUGGAAgGAACC | 0.1% |
| 7890 | 2537 | UCUUcGGAUGGAAAGAACC | 0.1% |
| 7891 | 2537 | UCUUUGGAUGGAAgaAACC | 0.2% |
| 7892 | 2537 | UCUUUGGcUGGAgAGAgCC | 2.0% |
| 7893 | 2537 | UuUUcGGAUGGAAAGAgCC | 0.1% |
| 7894 | 2537 | UuUUcGGcUGGAAAGAACC | 0.7% |
| 2538 | 2538 | AGCCUAUGUGGAUGGAUUC | 90.4% |
| 7895 | 2538 | AGCGUAUGUGGAUGGAUUu | 7.9% |
| 7896 | 2538 | AGCCUAUGUGGAUGGgUUC | 0.6% |
| 7897 | 2538 | AaCCUAUGUGGAUGGAUUC | 0.5% |
| 7898 | 2538 | AGCCUAUGUaGAUGGAUUC | 0.2% |
| 7899 | 2538 | AGCCUAUGUGGAUaGAUUC | 0.1% |
| 7900 | 2538 | AGCCUAUGUGGAUGGAUaC | 0.1% |
| 7901 | 2538 | AaCCUAUGUGGAUGGAUUu | 0.1% |
| 2539 | 2539 | CAAUGAAAGAGUAUGGAGA | 90.4% |
| 7902 | 2539 | CAAUGAAAGAGUAUGGgGA | 4.1% |
| 7903 | 2539 | CgAUGAAAGAGUAUGGAGA | 0.1% |
| 7904 | 2539 | CAAUGAAgGAGUAUGGgGA | 0.3% |
| 7905 | 2539 | CAAUGAAAGAaUAUGGAGA | 2.1% |
| 7906 | 2539 | CAAUGAAAGAGUAcGGAGA | 0.1% |
| 7907 | 2539 | CAAUGAAAGAGUuUGGAGA | 0.1% |
| 7908 | 2539 | CAAUGAAAGAaUAUGGgGA | 1.6% |
| 7909 | 2539 | CAAUGAAgGAaUAUGGgGA | 0.3% |
| 7910 | 2539 | CAAUGAAgGAGUAcGGgGA | 0.6% |
| 7911 | 2539 | CAAUGAAAGAacAUGGAGA | 0.1% |
| 2540 | 2540 | UGAAGCAAUAUGAUAGUGA | 90.2% |
| 7912 | 2540 | UGAAGCAgUAUGAUAGUGA | 0.4% |
| 7913 | 2540 | UaAAGCAAUAUGAUAGUGA | 0.4% |
| 7914 | 2540 | UGAAaCAAUAUGAUAGUGA | 0.2% |
| 7915 | 2540 | UGAAGCAAUAcGAUAGUGA | 0.5% |
| 7916 | 2540 | UGAAGCAAUAUaAUAGUGA | 0.4% |
| 7917 | 2540 | UGAAGCAAUAUGAcAGUGA | 1.6% |
| 7918 | 2540 | UGAAGCAAUAUGAUAGcGA | 1.6% |
| 7919 | 2540 | UGAAGCAAUAUGAUAGUaA | 0.1% |
| 7920 | 2540 | UGAAGCAAUAUuAUAGUGA | 0.1% |
| 7921 | 2540 | UGAAGCAAUAUGAcAGcGA | 0.2% |
| 2541 | 2541 | UGGAAGAUUUUGUGCGACA | 90.1% |
| 7922 | 2541 | UGGAAGAUUUUGUGCGgCA | 0.2% |
| 7923 | 2541 | UGGAgGAUUUUGUGCGACA | 0.2% |
| 7924 | 2541 | UGGAAGAaUUUGUGCGACA | 0.3% |
| 7925 | 2541 | UGGAAGAcUUUGUGCGACA | 3.4% |
| 7926 | 2541 | UGGAAGAUUUcGUGCGACA | 0.1% |
| 7927 | 2541 | UGGAAGAUUUUGUaCGACA | 1.6% |
| 7928 | 2541 | UGGAAGAUUUUGUGaGACA | 0.1% |
| 7929 | 2541 | UGGAAGAUUUUGUGgGACA | 0.1% |
| 7930 | 2541 | UGGAAGAcUgUGUGCGACA | 0.1% |
| 7931 | 2541 | UGGAAGAUUUUGaGgGACA | 0.1% |
| 2542 | 2542 | AUGGAAGAUUUUGUGCGAC | 90.1% |
| 7932 | 2542 | AUGGAAGAUUUUGUGCGgC | 0.2% |
| 7933 | 2542 | AUGGAgGAUUUUGUGCGAC | 0.2% |
| 7934 | 2542 | AUGGAAGAaUUUGUGCGAC | 0.3% |
| 7935 | 2542 | AUGGAAGAcUUUGUGCGAC | 3.4% |
| 7936 | 2542 | AUGGAAGAUUUcGUGCGAC | 0.1% |
| 7937 | 2542 | AUGGAAGAUUUUGUaCGAC | 1.6% |
| 7938 | 2542 | AUGGAAGAUUUUGUGaGAC | 0.1% |
| 7939 | 2542 | AUGGAAGAUUUUGUGgGAC | 0.1% |
| 7940 | 2542 | AUGGAAGAcUgUGUGCGAC | 0.1% |
| 7941 | 2542 | AUGGAAGAUUUUGaGgGAC | 0.1% |
| 2543 | 2543 | AAAGAGUUUUUUGAGAAUA | 90.1% |
| 7942 | 2543 | AAAGAGUUUUUUGAGAgUA | 0.4% |
| 7943 | 2543 | AAAGAGUUUUUUGAGgAUA | 0.2% |
| 7944 | 2543 | AAgGAGUUUUUUGAGAAUA | 0.1% |
| 7945 | 2543 | AAAGAaUUUUUUGAGAAUA | 0.3% |
| 7946 | 2543 | AAAGAGUUUUUcGAGAAUA | 1.5% |
| 7947 | 2543 | AAAGAGUUUUUUGAaAAUA | 0.5% |
| 7948 | 2543 | AAAGAGUUUUUUGAGAAcA | 1.6% |
| 7949 | 2543 | AAAGAuUUUUUUGAGAAUA | 0.2% |
| 7950 | 2543 | AAAGnGUUUUUUGAGAAUA | 0.1% |
| 7951 | 2543 | AAAGAGUUCUUUGAGAAcA | 0.3% |
| 7952 | 2543 | AAAGAGUUUUUcaAGAAUA | 0.2% |
| 2544 | 2544 | UAAUGAAGGGCGUAUACAU | 90.0% |
| 7953 | 2544 | UAAUGAAGGGGGUAUACgU | 0.7% |
| 7954 | 2544 | UAAUGAAGGGGGUgUACAU | 0.6% |
| 7955 | 2544 | UAgUGAAGGGCGUAUACAU | 0.1% |
| 7956 | 2544 | UAAUGAAaGGGGUAUACAU | 0.2% |
| 7957 | 2544 | UAAUGAAGGGaGUAUACAU | 3.8% |
| 7958 | 2544 | UAAUGAAGGGGaUAUACAU | 0.1% |
| 7959 | 2544 | UAAUGAAGGGGGUuUACAU | 2.2% |
| 7960 | 2544 | UAAUGAAGGGaGUgUACAU | 2.0% |
| 7961 | 2544 | UAAUGAAGGGaaUAUACAU | 0.1% |
| 2545 | 2545 | GAAGAUUUUGUGCGACAAU | 90.0% |
| 7962 | 2545 | GAAGAUUUUGUGCGACAgU | 0.9% |
| 7963 | 2545 | GAAGAUUUUGUGCGgCAAU | 0.2% |
| 7964 | 2545 | GAgGAUUUUGUGCGACAAU | 0.2% |
| 7965 | 2545 | GAAGAaUUUGUGCGACAAU | 0.3% |
| 7966 | 2545 | GAAGAcUUUGUGCGACAAU | 3.1% |
| 7967 | 2545 | GAAGAUUUcGUGCGACAAU | 0.1% |
| 7968 | 2545 | GAAGAUUUUGUaCGACAAU | 1.6% |
| 7969 | 2545 | GAAGAUUUUGUGaGACAAU | 0.1% |
| 7970 | 2545 | GAAGAUUUUGUGgGACAAU | 0.1% |
| 7971 | 2545 | GAAGAcUUUGUGCGACAgU | 0.3% |
| 7972 | 2545 | GAAGAcUgUGUGCGACAAU | 0.1% |
| 7973 | 2545 | GAAGAUUUUGaGgGACAAU | 0.1% |

TABLE 20-4

Conserved and minor variant 19-mer sequences
from the Influenza A segment 5 (NP) sequences
listed in Table 1-5. The conserved sequences
match at least 89% of the listed viral se-
quences, and the variants contain 3 or fewer
nucleotide changes from the reference sequence.

| | | | |
|---|---|---|---|
| Seq ID | Ref ID | Match Seq | % Total |

| | | | |
|---|---|---|---|
| 3546 | 3546 | UCUUAUUUCUUCGGAGACA | 98.0% |
| 7974 | 3546 | UCUUAUUUCUUCGGgGAGA | 1.6% |
| 7975 | 3546 | UCUUAUUUCUUuGGAGACA | 0.2% |
| 7976 | 3546 | UCUUAUUUCUUCGGgGAuA | 0.1% |
| 3547 | 3547 | AUUUCUUCGGAGACAAUGC | 97.9% |
| 7977 | 3547 | AUUUCUUCGGAGACAgUGC | 0.1% |
| 7978 | 3547 | AUUUCUUCGGgGACAAUGC | 1.6% |
| 7979 | 3547 | AUUUCUUuGGAGACAAUGC | 0.2% |
| 7980 | 3547 | AUUUCUUCGGgGAuAAUGC | 0.1% |
| 3548 | 3548 | UAUUUCUUCGGAGACAAUG | 97.9% |
| 7981 | 3548 | UAUUUCUUCGGAGACAgUG | 0.1% |
| 7982 | 3548 | UAUUUCUUCGGgGACAAUG | 1.6% |
| 7983 | 3548 | UAUUUCUUuCGAGACAAUG | 0.2% |
| 7984 | 3548 | UAUUUCUUCGGgGAUAAUG | 0.1% |
| 3549 | 3549 | UUAUUUCUUCGGAGACAAU | 97.9% |
| 7985 | 3549 | UUAUUUCUUCGGAGACAgU | 0.1% |
| 7986 | 3549 | UUAUUUCUUCGGgGACAAU | 1.6% |
| 7987 | 3549 | UUAUUUCUUuGGAGACAAU | 0.2% |
| 7988 | 3549 | UUAUUUCUUCGGgGAuAAU | 0.1% |
| 3550 | 3550 | CUUAUUUCUUCGGAGACAA | 97.9% |
| 7989 | 3550 | CUUAUUUCUUCGGAGACAg | 0.1% |
| 7990 | 3550 | CUUAUUUCUUCGGgGACAA | 1.6% |
| 7991 | 3550 | CUUAUUUCUUuGGAGACAA | 0.2% |
| 7992 | 3550 | CUUAUUUCUUCGGgGAuAA | 0.1% |
| 3551 | 3551 | UUUCUUCGGAGACAAUGCA | 97.8% |
| 7993 | 3551 | UUUCUUCGGAGACAgUGCA | 0.1% |
| 7994 | 3551 | UUUCUUCGGgGACAAUGCA | 1.6% |
| 7995 | 3551 | UUUCUUuGGAGACAAUGCA | 0.2% |
| 7996 | 3551 | UUUCUUCGGgGAuAAUGCA | 0.1% |
| 3552 | 3552 | AUGAAGGAUCUUAUUUCUU | 97.6% |
| 7997 | 3552 | AUGAAGGgUCUUAUUUCUU | 0.7% |
| 7998 | 3552 | AUGAgGGAUCUUAUUUCUU | 0.2% |
| 7999 | 3552 | AUGAgGGgUCUUAUUUCUU | 0.2% |
| 8000 | 3552 | AcGAAGGAUCUUAUUUCUU | 0.1% |
| 8001 | 3552 | AUGAAGGuUCUUAUUUCUU | 1.1% |
| 3553 | 3553 | AAUGAAGGAUCUUAUUUCU | 97.6% |
| 8002 | 3553 | AAUGAAGGgUCUUAUUUCU | 0.7% |
| 8003 | 3553 | AAUGAgGGAUCUUAUUUCU | 0.2% |
| 8004 | 3553 | AAUGAgGGGUCUUAUUUCU | 0.1% |
| 8005 | 3553 | AAcGAAGGAUCUUAUUUCU | 0.1% |
| 8006 | 3553 | AAUGAAGGuUCUUAUUUCu | 1.1% |
| 8007 | 3553 | uAUGAgGGgUCUUAUUUCU | 0.1% |
| 3554 | 3554 | GAAGGAUCUUAUUUCUUCG | 97.5% |
| 8008 | 3554 | GAAGGAUCUUAUUUCUUuG | 0.2% |
| 8009 | 3554 | GAAGGgUCUUAUUUCUUCG | 0.7% |
| 8010 | 3554 | GAgGGAUCUUAUUUCUUCG | 0.2% |
| 8011 | 3554 | GAgGGgUCUUAUUUCUUCG | 0.2% |
| 8012 | 3554 | GAAGGuUCWAUUUCUUUCG | 1.1% |
| 3555 | 3555 | AAGGAUCUUAUUUCUUCGG | 97.5% |
| 8013 | 3555 | AAGGAUCUUAUUUCUUuGG | 0.2% |
| 8014 | 3555 | AAGGgUCUUAUUUCUUCGG | 0.7% |
| 8015 | 3555 | AgGGAUCUUAUUUCUUCGG | 0.2% |
| 8016 | 3555 | AgGGgUCUUAUUUCUUCGG | 0.2% |
| 8017 | 3555 | AAGGuUCUUAUUUCUUCGG | 1.1% |
| 3556 | 3556 | UGAAGGAUCUUAUUUCUUC | 97.4% |
| 8018 | 3556 | UGAAGGAUCUUAUUUCUUu | 0.2% |
| 8019 | 3556 | UGAAGGgUCUUAUUUCUUC | 0.7% |
| 8020 | 3556 | UGAgGGAUCUUAUUUCUUC | 0.2% |
| 8021 | 3556 | UGAgGGgUCUUAUUUCUUC | 0.2% |
| 8022 | 3556 | cGAAGGAUCUUAUUUCUUC | 0.1% |
| 8023 | 3556 | UGAAGGuUCUUAUUUCUUC | 1.1% |
| 3557 | 3557 | UAAUGAAGGAUCUUAUUUC | 97.3% |
| 8024 | 3557 | UAAUGAAGGgUCUUAUUUC | 0.7% |
| 8025 | 3557 | UAAUGAgGGAUCUUAUUUC | 0.2% |
| 8026 | 3557 | UAAUGAgGGgUCUUAUUUC | 0.1% |
| 8027 | 3557 | cAAUGAAGGAUCUUAUUUC | 0.3% |
| 8028 | 3557 | UAAcGAAGGAUCUUAUUUC | 0.1% |
| 8029 | 3557 | UAAUGAAGGuUCUUAUUUC | 1.1% |
| 8030 | 3557 | UUAUGAgGGgUCUUAUUUC | 0.1% |
| 3558 | 3558 | UUCUUCGGAGACAAUGCAG | 96.5% |
| 8031 | 3558 | UUCUUCGGAGACAgUGCAG | 0.1% |
| 8032 | 3558 | UUCUUCGGgGACAAUGCAG | 1.6% |
| 8033 | 3558 | UUCUUuGGAGACAAUGCAG | 0.2% |
| 8034 | 3558 | UUCUUCGGgGAuAAUGCAG | 0.1% |
| 8035 | 3558 | UUCUUGGGAGACAAUGCAa | 0.3% |
| 3559 | 3559 | UCUUCGGAGACAAUGCAGA | 96.4% |
| 8036 | 3559 | UCUUCGGAGACAgUGCAGA | 0.1% |
| 8037 | 3559 | UCUUCGGgGACAAUGCAGA | 1.6% |
| 8038 | 3559 | UCUUuGGAGACAAUGCAGA | 0.2% |
| 8039 | 3559 | UCUUCGGgGAuAAUGCAGA | 0.1% |
| 8040 | 3559 | UCUUCGGAGACAAUGCAaA | 0.3% |
| 3560 | 3560 | GAUCUUAUUUCUUCGGAGA | 96.0% |
| 8041 | 3560 | GAUCUUAUUUCUUCGGgGA | 1.7% |
| 8042 | 3560 | GAUCUUAUUUCUUuGGAGA | 0.2% |
| 8043 | 3560 | GgUCUUAUUUGUUCGGAGA | 0.9% |
| 8044 | 3560 | GuUCUUAUUUCUUCGGAGA | 1.1% |
| 3561 | 3561 | GGAUCUUAUUUCUUCGGAG | 96.0% |
| 8045 | 3561 | GGAUGUUAUUUCUUCGGgG | 1.7% |
| 8046 | 3561 | GGAUCUUAUUUCUUUGGAG | 0.2% |
| 8047 | 3561 | GGgUCUUAUUUCUUCGGAG | 0.9% |
| 8048 | 3561 | GGUUCUUAUUUCUUCGGAG | 1.1% |
| 3562 | 3562 | AUCUUAUUUCUUCGGAGAC | 96.0% |
| 8049 | 3562 | AUCUUAUUUCUUCGGgGAC | 1.6% |
| 8050 | 3562 | AUCUUAUUUCUUUGGAGAC | 0.2% |
| 8051 | 3562 | gUCUUAUUUCUUCGGAGAC | 0.9% |
| 8052 | 3562 | AUCUUAUUUCUUCGGgGAu | 0.1% |
| 8053 | 3562 | uUCUUAUUUCUUCGGAGAC | 1.1% |
| 3563 | 3563 | AGGAUCUUAUUUCUUCGGA | 95.8% |
| 8054 | 3563 | AGGAUCUUAUUUCUUCGGg | 1.7% |
| 8055 | 3563 | AGGAUCUUAUUUCUUuGGA | 0.2% |
| 8056 | 3563 | AGGgUCUUAUUUCUUCGGA | 0.7% |
| 8057 | 3563 | gGGAUCUUAUUUCUUCGGA | 0.2% |
| 8058 | 3563 | gGGgUCUUAUUUCUUCGGA | 0.2% |
| 8059 | 3563 | AGGuUCUUAUUUCUUCGGA | 1.1% |
| 3564 | 3564 | AGUAAUGAAGGAUCUUAUU | 95.4% |
| 8060 | 3564 | AGUAAUGAAGGgUCUUAUU | 0.7% |
| 8061 | 3564 | AGUAAUGAgGGAUCUUAUU | 0.2% |
| 8062 | 3564 | AaUAAUGAAGGAUCUUAUU | 1.9% |
| 8063 | 3564 | AGcAAUGAAGGAUCUUAUU | 0.3% |
| 8064 | 3564 | AGUAAcGAAGGAUCUUAUU | 0.1% |
| 8065 | 3564 | AGUAAUGAAGGuUCUUAUU | 1.1% |
| 8066 | 3564 | AaUAAUGAgGGgUCUUAUU | 0.1% |
| 3565 | 3565 | GUAAUGAAGGAUCUUAUUU | 95.4% |
| 8067 | 3565 | GUAAUGAAGGgUCUUAUUU | 0.7% |
| 8068 | 3565 | GUAAUGAgGGAUCUUAUUU | 0.2% |
| 8069 | 3565 | aUAAUGAAGGAUCUUAUUU | 1.9% |
| 8070 | 3565 | GcAAUGAAGGAUCUUAUUU | 0.3% |
| 8071 | 3565 | GUAAcGAAGGAUCUUAUUU | 0.1% |
| 8072 | 3565 | GUAAUGAAGGuUCUUAUUU | 1.1% |
| 8073 | 3565 | aUAAUGAgGGgUCUUAUUU | 0.1% |
| 3566 | 3566 | AUGAGUAAUGAAGGAUCUU | 95.3% |
| 8074 | 3566 | AUGAGUAAUGAAGGgUCUU | 0.7% |
| 8075 | 3566 | AUGAGUAAUGAgGGAUCUU | 0.2% |
| 8076 | 3566 | AUaAGUAAUGAAGGAUCUU | 0.2% |
| 8077 | 3566 | AUGAaUAAUGAAGGAUCUU | 1.9% |
| 8078 | 3566 | AUGAGcAAUGAAGGAUCUU | 0.3% |
| 8079 | 3566 | AUGAGUAAcGAAGGAUCUU | 0.1% |
| 8080 | 3566 | AUGAGUAAUGAAGGuUCUU | 1.1% |
| 8081 | 3566 | AUGAaUAAUGAgGGgUCUU | 0.1% |
| 3567 | 3567 | UGAGUAAUGAAGGAUCUUA | 95.3% |
| 8082 | 3567 | UGAGUAAUGAACGgUCUUA | 0.7% |
| 8083 | 3567 | UGAGUAAUGAgGGAUCUUA | 0.2% |
| 8084 | 3567 | UaAGUAAUGAAGGAUCUUA | 0.2% |
| 8085 | 3567 | UGAaUAAUGAAGGAUCUUA | 1.9% |
| 8086 | 3567 | UGAGcAAUGAAGGAUCUUA | 0.3% |
| 8087 | 3567 | UGAGUAAcGAAGGAUCUUA | 0.1% |
| 8088 | 3567 | UGAGUAAUGAAGGuUCUUA | 1.1% |
| 8089 | 3567 | UGAaUAAUGAgGGgUCUUA | 0.1% |
| 3568 | 3568 | GAGUAAUGAAGGAUCUUAU | 95.3% |
| 8090 | 3568 | GAGUAAUGAAGGgUCUUAU | 0.7% |
| 8091 | 3568 | GAGUAAUGAgGGAUCUUAU | 0.2% |
| 8092 | 3568 | aAGUAAUGAAGGAUCUUAU | 0.2% |
| 8093 | 3568 | GAaUAAUGAAGGAUCUUAU | 1.9% |
| 8094 | 3568 | GAGcAAUGAAGGAUCUUAU | 0.3% |
| 8095 | 3568 | GAGUAAcGAAGGAUCUUAU | 0.1% |
| 8096 | 3568 | GAGUAAUGAAGGuUCUUAU | 1.1% |
| 8097 | 3568 | GAaUAAUGAgGGgUCUUAU | 0.1% |
| 3569 | 3569 | UACAAAUUGCUUCAAAUGA | 93.7% |
| 8098 | 3569 | UACAgAUUGCUUCAAAUGA | 0.1% |
| 8099 | 3569 | UgCAAAUUGCUUCAAAUGA | 0.1% |
| 8100 | 3569 | UACAAAUUGCcUCAAAUGA | 0.1% |
| 8101 | 3569 | UACAAAUUGCUUCAAAcGA | 0.1% |
| 8102 | 3569 | UuCAAAUUGCUUCAAAUGA | 2.3% |
| 8103 | 3569 | UuCAgAUUGCUUCAAAUGA | 2.6% |
| 8104 | 3569 | UuCAAAUaGCUUCAAAUGA | 0.2% |
| 8105 | 3569 | UuCAAAUUGCUUCcAAUGA | 0.5% |
| 8106 | 3569 | UuCAgAUUGCgUCAAAUGA | 0.3% |
| 8107 | 3569 | UuCAgAUUGCUUCcAAUGA | 0.1% |
| 3570 | 3570 | AAUUUCAAACAGCUGCACA | 93.5% |
| 8108 | 3570 | AAUUUCAAACAGCUGCgCA | 0.3% |
| 8109 | 3570 | AAUUUCAAACgGCUGCACA | 0.4% |
| 8110 | 3570 | AAUUUCAAgCAGCUGCACA | 0.1% |
| 8111 | 3570 | AAUUUCAgACAGCUGCACA | 0.3% |
| 8112 | 3570 | AAcUUCAAACAGCUGCACA | 0.2% |
| 8113 | 3570 | AAUUcCAAACAGCUGCACA | 0.1% |
| 8114 | 3570 | AAUUUCAAACAGCaGCACA | 2.1% |
| 8115 | 3570 | AAUUUCAAACAGCUGCuCA | 0.1% |
| 8116 | 3570 | AAUUUCAAACuGCUGCACA | 0.5% |
| 8117 | 3570 | AAUUUCAAACgGCaGCACA | 0.1% |
| 8118 | 3570 | AAUUUCAgACAGCUGCcCA | 0.3% |
| 8119 | 3570 | AgUUUCAgACAGCUGCcCA | 0.1% |
| 8120 | 3570 | AAUUcCAAACAGCaGCACA | 1.9% |
| 8121 | 3570 | AAUUUCAgACcGCaGCACA | 0.1% |
| 3571 | 3571 | AAAUUUCAAACAGCUGCAC | 93.5% |
| 8122 | 3571 | AAAUUUCAAACAGCUGCgC | 0.3% |
| 8123 | 3571 | AAAUUUCAAACgGCUGCAC | 0.4% |
| 8124 | 3571 | AAAUUUCAAgCAGCUGCAC | 0.1% |
| 8125 | 3571 | AAAUUUCAgACAGCUGCAC | 0.3% |
| 8126 | 3571 | AAAcUUCAAACAGCUGCAC | 0.2% |
| 8127 | 3571 | AAAUUcCAAACAGCUGCAC | 0.1% |
| 8128 | 3571 | AAAUUUCAAACAGCaGCAC | 2.1% |
| 8129 | 3571 | AAAUUUCAAACAGCUGCuC | 0.1% |
| 8130 | 3571 | AAAUUUCAAACuGCUGCAC | 0.5% |
| 8131 | 3571 | AAAUUUCAAACgGCaGCAC | 0.1% |
| 8132 | 3571 | AAAUUUCAgACAGCUGCcC | 0.3% |
| 8133 | 3571 | AAgUUUCAgACAGCUGCcC | 0.1% |
| 8134 | 3571 | AAAUUcCAAACAGCaCCAC | 1.9% |
| 8135 | 3571 | AAAUUUCAgACcGCaGCAC | 0.1% |
| 3572 | 3572 | GUACAAAUUGCUUCAAAUG | 93.4% |
| 8136 | 3572 | GUACAgAUUGCUUCAAAUG | 0.1% |
| 8137 | 3572 | GUgCAAAUUGCUUCAAAUG | 0.1% |
| 8138 | 3572 | aUACAAAUUGCUUCAAAUG | 0.4% |
| 8139 | 3572 | GUACAAAUUGCcUCAAAUG | 0.1% |
| 8140 | 3572 | GUACAAAUUGCUUCAAAcG | 0.1% |
| 8141 | 3572 | GUUCAAAUUGCUUCAAAUG | 2.1% |
| 8142 | 3572 | GUuCAgAUUGCUUCAAAUG | 2.5% |
| 8143 | 3572 | aUUCAAAUUGCUUCAAAUG | 0.2% |
| 8144 | 3572 | GUuCAAAUaGCUUCAAAUG | 0.2% |
| 8145 | 3572 | GUuCAAAUUGCUUCcAAUG | 0.5% |
| 8146 | 3572 | aUuCAgAUUGCUUCAAAUG | 0.1% |
| 8147 | 3572 | GUuCAgAUUGCgUCAAAUG | 0.3% |
| 8148 | 3572 | GUuCAgAUUGCUUCcAAUG | 0.1% |
| 3573 | 3573 | AUGGUGCUCUCUGCUUUUG | 93.3% |
| 8149 | 3573 | AUGGUGCUuUCUGCUUUUG | 0.2% |
| 8150 | 3573 | AUGGUaCUCUCUGCUUUUG | 0.8% |
| 8151 | 3573 | AUGGUGCUaUCUGCUUUUG | 0.1% |
| 8152 | 3573 | AUGGUGCUCUCaGCUUUUG | 0.1% |
| 8153 | 3573 | AUGGUGCUCUCUGCcUUUG | 1.1% |
| 8154 | 3573 | AUGGUGCUCUCUGCgUUUG | 0.1% |
| 8155 | 3573 | AUGGUGCUCUCUGCUUUcG | 0.2% |
| 8156 | 3573 | AUGGUaCUCUCUGCaUUUG | 1.7% |
| 8157 | 3573 | AUGGUcCUCUCUGCaUUUG | 0.2% |
| 8158 | 3573 | AUGGUuCUCUCUGCaUUUG | 1.9% |
| 3574 | 3574 | UGGUGCUCUCUGCUUUUGA | 93.3% |
| 8159 | 3574 | UGGUGCUuUCUGCUUUUGA | 0.2% |
| 8160 | 3574 | UGGUaCUCUCUGCUUUUGA | 0.8% |
| 8161 | 3574 | UGGUGCUaUCUGCUUUUGA | 0.1% |
| 8162 | 3574 | UGGUGCUCUCaGCUUUUGA | 0.1% |
| 8163 | 3574 | UGGUGCUCUCUGCcUUUGA | 1.1% |
| 8164 | 3574 | UGGUGCUCUCUGCgUUUGA | 0.1% |
| 8165 | 3574 | UGGUGCUCUCUGCUUUcGA | 0.2% |
| 8166 | 3574 | UGGUaCUCUCUGCaUUUGA | 1.7% |
| 8167 | 3574 | UGGUcCUCUCUGCaUUUGA | 0.2% |
| 8168 | 3574 | UGGUuCUCUCUGCaUUUGA | 1.9% |
| 3575 | 3575 | CAAGGCACCAAACGGUCUU | 93.2% |
| 8169 | 3575 | CAAGGuACCAAACGGUCUU | 0.1% |
| 8170 | 3575 | CAgGGCACCAAACGGUCUU | 0.8% |
| 8171 | 3575 | CAAGGCAaCAAACGGUCUU | 0.1% |
| 8172 | 3575 | CAAGGCACCAAACGaUCUU | 4.7% |
| 8173 | 3575 | CAAGGCACCAcACGGUCUU | 0.1% |
| 8174 | 3575 | aAAGGCACCAAACGaUCUU | 0.1% |
| 8175 | 3575 | CAAGGCACCAAACGaUCaU | 0.7% |
| 8176 | 3575 | CAAGGCACCAAACGaUCcU | 0.4% |
| 3576 | 3576 | AAGGCACCAAACGGUCUUA | 93.2% |
| 8177 | 3576 | AAGGuACCAAACGGUCUUA | 0.1% |
| 8178 | 3576 | AgGGCACCAAACGGUGUUA | 0.8% |
| 8179 | 3576 | AAGGCAaCAAACGGUCUUA | 0.1% |
| 8180 | 3576 | AAGGCACCAAACGaUCUUA | 4.7% |
| 8181 | 3576 | AAGGCACCAcACGGUCUUA | 0.1% |
| 8182 | 3576 | AAGGCACCAAACGaUCaUA | 0.7% |
| 8183 | 3576 | AACGCACCAAACGaUCcUA | 0.4% |
| 3577 | 3577 | AGAGAAUGUGCAACAUUCU | 93.0% |
| 8184 | 3577 | AGAGAAUGUGCAAUAUUCU | 0.3% |
| 8185 | 3577 | AGAGgAUGUGCAACAUUCU | 0.5% |
| 8186 | 3577 | AaAGAAUGUGCAACAUUCU | 1.2% |
| 8187 | 3577 | AGAGAAUGUGCAACAUcCU | 4.0% |
| 8188 | 3577 | AuAGAAUGUGCAACAUUCU | 0.3% |
| 8189 | 3577 | AaAGAAUGUGCAAuAUUCU | 0.4% |
| 8190 | 3577 | AGAGAAUGUGCAACgUcCU | 0.1% |
| 8191 | 3577 | AGAGAAUGUGCAAuAUcCU | 0.2% |
| 8192 | 3577 | AGAGgAUGUGCAACAUcCU | 0.1% |
| 3578 | 3578 | GAGAGAAUGUGCAACAUUC | 93.0% |
| 8193 | 3578 | GAGAGAAUGUGCAAuAUUC | 0.3% |
| 8194 | 3578 | GAGAGgAUGUGCAACAUUC | 0.5% |
| 8195 | 3578 | GAaAGAAUGUGCAACAUUC | 1.2% |
| 8196 | 3578 | GAGAGAAUGUGCAACAUcC | 4.0% |
| 8197 | 3578 | GAuAGAAUGUGCAACAUUC | 0.3% |
| 8198 | 3578 | GAaAGAAUGUGCAAuAUUC | 0.4% |
| 8199 | 3578 | GAGAGAAUGUGcAACgUcC | 0.1% |
| 8200 | 3578 | GAGAGAAUGUGCAAuAUcC | 0.2% |
| 8201 | 3578 | GAGAGgAUGUGCAACAUcC | 0.1% |
| 3579 | 3579 | AUUUCAAACAGCUGCACAA | 92.7% |
| 8202 | 3579 | AUUUCAAACAGCUGCACAg | 0.9% |
| 8203 | 3579 | AUUUCAAACAGCUGCgCAA | 0.3% |
| 8204 | 3579 | AUUUCAAACgGCUGCACAA | 0.4% |
| 8205 | 3579 | AUUUCAAgCAGCUGCACAA | 0.1% |
| 8206 | 3579 | AUUUCAgACAGCUGCACAg | 0.3% |
| 8207 | 3579 | AcUUCAAACAGCUGCACAA | 0.2% |
| 8208 | 3579 | AUUcCAAACAGCUGCACAA | 0.1% |
| 8209 | 3579 | AUUUCAAACAGCaGCACAA | 2.1% |
| 8210 | 3579 | AUUUCAAACAGCUGCuCAA | 0.1% |
| 8211 | 3579 | AUUUCAAACuGCUGCACAA | 0.5% |
| 8212 | 3579 | AUUUCAAACgGCaGCACAA | 0.1% |
| 8213 | 3579 | AUUUCAgACAGCUGCcCAg | 0.3% |
| 8214 | 3579 | AUUcCAAACAGCaGCACAA | 1.9% |
| 8215 | 3579 | AUUUCAgACcGCaGCACAA | 0.1% |
| 3580 | 3580 | UUUCAAACAGCUGCACAAA | 92.7% |
| 8216 | 3580 | UUUCAAACAGCUGCACAgA | 0.9% |
| 8217 | 3580 | UUUCAAACAGCUGCgCAAA | 0.3% |
| 8218 | 3580 | UUUCAAACgGCUGCACAAA | 0.4% |
| 8219 | 3580 | UUUCAAgCAGCUGCACAAA | 0.1% |
| 8220 | 3580 | UUUCAgACAGCUGCACAgA | 0.3% |
| 8221 | 3580 | cUUCAAACAGCUGCACAAA | 0.2% |
| 8222 | 3580 | UUcCAAACAGCUGCACAAA | 0.1% |
| 8223 | 3580 | UUUCAAACAGCaGCACAAA | 2.0% |
| 8224 | 3580 | UUUCAAACAGCUGCuCAAA | 0.1% |
| 8225 | 3580 | UUUGAAACuGCUGCACAAA | 0.5% |
| 8226 | 3580 | UUUCAAACgGCaGCACAAA | 0.1% |
| 8227 | 3580 | UUUCAgACAGCUGCcCAgA | 0.4% |
| 8228 | 3580 | UUcCAAACAGCaGCACAAA | 1.7% |
| 8229 | 3580 | UUUCAAACAGCaGCACAAc | 0.1% |
| 3581 | 3581 | GGAACCCAGGAAAUGCUGA | 92.2% |
| 8230 | 3581 | GGAACCCAGGgAAUGCUGA | 0.6% |
| 8231 | 3581 | GGAAuCCAGGAAAUGCUGA | 1.2% |
| 8232 | 3581 | GaAACCCAGGAAAUGCUGA | 0.4% |
| 8233 | 3581 | GGAACCCAaGAAAUGCUGA | 0.1% |
| 8234 | 3581 | GGAACCCAGGAAAcGCUGA | 0.9% |
| 8235 | 3581 | GGAACCCAGGAAAUaCUGA | 0.1% |
| 8236 | 3581 | GaAACCCAGGgAAUGCUGA | 0.4% |
| 8237 | 3581 | GaAAuCCAGGgAAUGCUGA | 0.1% |
| 8238 | 3581 | GGAAuCCuGGgAAUGCUGA | 0.2% |
| 3582 | 3582 | CGAACCCGAUCGUGCCCUC | 92.1% |
| 8239 | 3582 | CGAACCCGAUCGUGCCuUC | 5.1% |
| 8240 | 3582 | CGAACCCGgUCGUGCCCUC | 1.1% |
| 8241 | 3582 | CGAgCCCGAUCGUGCCCUC | 0.1% |
| 8242 | 3582 | CGAgCCCGAUCGUGCCuUC | 0.6% |
| 8243 | 3582 | CGAACCCaAUCGUGCCCUC | 0.5% |
| 8244 | 3582 | CGAACCCcAUCGUGCCCUC | 0.3% |
| 8245 | 3582 | CGAACCCGAUCGUuCCCUC | 0.1% |
| 8246 | 3582 | CGAACCCuAUCGUGCCCUC | 0.1% |
| 3583 | 3583 | CGGAACCCAGGAAAUGCUG | 92.1% |
| 8247 | 3583 | CGGAACCCAGGgAAUGCUG | 0.6% |
| 8248 | 3583 | CGGAAuCCAGGAAAUGCUG | 1.2% |
| 8249 | 3583 | uGGAACCCAGGAAAUGCUG | 0.1% |
| 8250 | 3583 | CGaAACCCAGGAAAUGCUG | 0.4% |
| 8251 | 3583 | CGGAACCCAaGAAAUGCUG | 0.1% |
| 8252 | 3583 | CGGAACCCAGGAAAcGCUG | 0.9% |
| 8253 | 3583 | CGGAACCCAGGAAAUaCUG | 0.1% |
| 8254 | 3583 | CGaAACCCAGGgAAUGCUG | 0.4% |
| 8255 | 3583 | CGGAAuCCuCGgAAUGCUG | 0.1% |
| 3584 | 3584 | AAUGCUGAGAUCGAAGAUC | 91.7% |
| 8256 | 3584 | AAUGCUGAGAUuGAAGAUC | 1.3% |
| 8257 | 3584 | AAcGCUGAGAUCGAAGAUC | 0.2% |
| 8258 | 3584 | AAUaCUGAGAUCGAAGAUC | 0.1% |
| 8259 | 3584 | AAUGCUGAaAUCGAAGAUC | 0.9% |
| 8260 | 3584 | AAUGCUGAGAUaGAAGAUC | 0.1% |
| 8261 | 3584 | AAUGCUGAGuUCGAAGAUC | 0.5% |
| 8262 | 3584 | AAcGCUGAGAUuGAAGAUC | 0.2% |
| 8263 | 3584 | AAUGCUGAaAUUGAAGAUC | 4.1% |
| 8264 | 3584 | AAUGCUGAGAUuGAAGAcC | 0.2% |
| 8265 | 3584 | AAUGCUGAGuaCGAAGAUC | 0.1% |
| 8266 | 3584 | AAcGCUGAaAUuGAAGAUC | 0.5% |
| 3585 | 3585 | AUGCUGAGAUCGAAGAUCU | 91.7% |
| 8267 | 3585 | AUGCUGAGAUuGAAGAUCU | 1.3% |
| 8268 | 3585 | AcGCUGAGAUCGAAGAUCU | 0.2% |
| 8269 | 3585 | AUaCUGAGAUCGAAGAUCU | 0.1% |
| 8270 | 3585 | AUGCUGAaAUCGAAGAUCU | 0.9% |
| 8271 | 3585 | AUGCUGAGAUaGAAGAUCU | 0.1% |
| 8272 | 3585 | AUGCUGAGuUCGAAGAUCU | 0.5% |
| 8273 | 3585 | AcGCUGAGAUuGAAGAUCU | 0.2% |
| 8274 | 3585 | AUGCUGAaAUuGAAGAUCU | 4.1% |
| 8275 | 3585 | AUGCUGAGAUuGAAGAcCU | 0.2% |
| 8276 | 3585 | AUGCUGAGuaCGAAGAUCU | 0.1% |
| 8277 | 3585 | ACGCUGAaAUuGAAGAUCU | 0.5% |
| 3586 | 3586 | GAUUCUACAUCCAAAUGUG | 91.6% |
| 8278 | 3586 | GAUUCUACAUCCAgAUGUG | 2.3% |
| 8279 | 3586 | GAUUCUACAUuCAAAUGUG | 0.9% |
| 8280 | 3586 | GAUUCUAuAUCCAAAUGUG | 0.5% |
| 8281 | 3586 | GAUUuUACAUCCAAAUGUG | 0.2% |
| 8282 | 3586 | GgUUCUACAUCCAAAUGUG | 0.3% |
| 8283 | 3586 | aAUUCUACAUCCAAAUGUG | 0.1% |
| 8284 | 3586 | GAUUCUACAUaCAgAUGUG | 0.1% |
| 8285 | 3586 | GgUUCUACAUaCAgAUGUG | 1.7% |
| 8286 | 3586 | aAUUCUACAUaCAAAUGUG | 0.2% |
| 3587 | 3587 | GCUGAGAUCGAAGAUCUCA | 91.5% |
| 8287 | 3587 | GCUGAGAUuGAAGAUCUCA | 1.4% |
| 8288 | 3587 | GCUGAGAUuGAAGAUCUuA | 0.1% |
| 8289 | 3587 | aCUGAGAUCGAAGAUCUCA | 0.1% |
| 8290 | 3587 | GCUGAaAUCGAAGAUCUCA | 0.9% |
| 8291 | 3587 | GCUGAGAUaGAAGAUCUCA | 0.1% |
| 8292 | 3587 | GCUGAGAUCGAAGAUCUaA | 0.4% |
| 8293 | 3587 | GCUGAGuUCGAAGAUCUCA | 0.5% |
| 8294 | 3587 | GCUGAaAUuGAAGAUCUCA | 4.4% |
| 8295 | 3587 | GCUGAaAUuGAAGAUCUuA | 0.2% |
| 8296 | 3587 | GCUGAGAUuGAAGAcCUuA | 0.2% |
| 8297 | 3587 | GCUGAGuaCGAAGAUCUCA | 0.1% |
| 3588 | 3588 | UCAUGGCAGCAUUCACUGG | 91.5% |
| 8298 | 3588 | UCAUGGCAGCAUUCAuUGG | 0.2% |
| 8299 | 3588 | UCAUGGCAGCAUUCgCUGG | 0.1% |
| 8300 | 3588 | UCAUGGCAGCAUUuACUGG | 0.4% |
| 8301 | 3588 | UCAUGGCAGCgUUCACUGG | 0.1% |
| 8302 | 3588 | UuAUGGCAGCAUUCACUGG | 1.6% |
| 8303 | 3588 | UCAUGGCAGCAUUCACcGG | 0.3% |
| 8304 | 3588 | UCAUGGCAGCuUUCACUGG | 0.3% |
| 8305 | 3588 | UCAUGGCuGCAUUCACUGG | 0.3% |
| 8306 | 3588 | UuAUGGCAGCAUUCAaUGG | 0.4% |
| 8307 | 3588 | UuAUGGCAGCAUUuACaGG | 1.7% |
| 8308 | 3588 | UuAUGGCAGCuUUCAuUGG | 0.2% |
| 8309 | 3588 | UuAUGGCAGCuUUCgCUGG | 0.1% |
| 8310 | 3588 | UCAUGGCgGCcUUCACaGG | 0.2% |
| 8311 | 3588 | UCAUuGCAGCAUUuACaGG | 0.1% |
| 3589 | 3589 | AAUGGUGCUCUCUGCUUUU | 91.5% |
| 8312 | 3589 | AAUGGUGCUuUCUGCUUUU | 0.2% |
| 8313 | 3589 | gAUGGUGCUCUCUGCUUUU | 1.8% |
| 8314 | 3589 | AAUGGUaCUCUCUGCUUUU | 0.8% |
| 8315 | 3589 | AAUGGUGCUaUCUGCUUUU | 0.1% |
| 8316 | 3589 | AAUGGUGCUCUCaGCUUUU | 0.1% |
| 8317 | 3589 | AAUGGUGCUCUCUGCcUUU | 1.1% |
| 8318 | 3589 | AAUGGUGCUCUCUGCgUUU | 0.1% |
| 8319 | 3589 | AAUGGUGGUCUCUGCUUUc | 0.2% |
| 8320 | 3589 | AAUGGUaCUCUCUGCaUUU | 1.7% |
| 8321 | 3589 | AAUGGUcCUcUCUGCaUUU | 0.2% |
| 8322 | 3589 | AAUGGUuCUCUCUGCaUUU | 1.9% |
| 3590 | 3590 | ACCCAGGAAAUGCUGAGAU | 91.4% |
| 8323 | 3590 | ACCCAGGgAAUGCUGAGAU | 0.6% |
| 8324 | 3590 | AuCCAGGAAAUGCUGAGAU | 1.0% |
| 8325 | 3590 | ACCCAaGAAAUGCUGAGAU | 0.1% |
| 8326 | 3590 | ACCCAGGAAAcGCUGAGAU | 0.4% |
| 8327 | 3590 | ACCCAGGAAAUaCUGAGAU | 0.1% |
| 8328 | 3590 | ACCCAGGAAAUGCUGAaAU | 1.0% |
| 8329 | 3590 | ACCCAGGgAAUGCUGAGuU | 0.4% |
| 8330 | 3590 | AuCCAGGAAAUGCUGAaAU | 0.1% |
| 8331 | 3590 | AuCCAGGAAAUGCUGAGuU | 0.1% |
| 8332 | 3590 | AuCCAGGgAAUGCUGAaAU | 0.1% |
| 8333 | 3590 | AUCCUGGgAAUGCUGAGAU | 0.3% |
| 8334 | 3590 | ACCCAGGAAAcGCUGAaAU | 0.5% |
| 8335 | 3590 | ACCCAGGAAAUGCUGAGua | 0.1% |
| 8336 | 3590 | ACCCAGGAAAUGCUGAaga | 0.1% |
| 3591 | 3591 | UCAGACAUGAGGGCAGAAA | 91.4% |
| 8337 | 3591 | UCAGACAUGAGGGCAGAgA | 0.2% |
| 8338 | 3591 | UCAGACAUGAGGGCgGAAA | 0.1% |
| 8339 | 3591 | UCAGAuAUGAGGGCAGAAA | 0.4% |
| 8340 | 3591 | UCgGACAUGAGGGCAGAAA | 0.4% |
| 8341 | 3591 | UCAGACAUGAGaGCAGAAA | 1.4% |
| 8342 | 3591 | UCAGACAUGAGGGCuGAAA | 0.4% |
| 8343 | 3591 | UCuGACAUGAGGGCAGAAA | 0.3% |
| 3592 | 3592 | UGCUGAGAUCGAAGAUCUC | 91.4% |
| 8344 | 3592 | UGCUGAGAUuGAAGAUCUC | 1.2% |
| 8345 | 3592 | UGCUGAGAUuGAAGAUCUu | 0.1% |
| 8346 | 3592 | cGCUGAGAUCGAAGAUCUC | 0.2% |
| 8347 | 3592 | UaCUGAGAUCGAAGAUCUC | 0.1% |
| 8348 | 3592 | UGCUGAaAUCGAAGAUCUC | 0.9% |
| 8349 | 3592 | UGCUGAGAUaGAAGAUCUC | 0.1% |
| 8350 | 3592 | UGCUGAGAUGGAAGAUCUa | 0.4% |
| 8351 | 3592 | UGCUGAGuUCGAAGAUCUC | 0.5% |
| 8352 | 3592 | cGCUGAGAUuGAAGAUCUC | 0.2% |
| 8353 | 3592 | UGCUGAaAUuGAAGAUCUC | 4.1% |
| 8354 | 3592 | UGCUGAGAUUGAAGAcCUu | 0.2% |
| 8355 | 3592 | UGCUGAGuaCGAAGAUCUC | 0.1% |
| 8356 | 3592 | cGCUGAaAUuCAAGAUCUC | 0.3% |
| 3593 | 3593 | CAGACAUGAGGGCAGAAAU | 91.4% |
| 8357 | 3593 | CAGACAUGAGGGCAGAgAU | 0.2% |
| 8358 | 3593 | CAGACAUGAGGGCgGAAAU | 0.1% |
| 8359 | 3593 | CAGAuAUGAGGGCAGAAAU | 0.4% |
| 8360 | 3593 | CgGACAUGAGGGCAGAAAU | 0.4% |
| 8361 | 3593 | CAGACAUGAGaGCAGAAAU | 1.4% |
| 8362 | 3593 | CAGACAUGAGGGCuGAAAU | 0.4% |
| 8363 | 3593 | CuGACAUGAGGGCAGAAAU | 0.3% |
| 3594 | 3594 | AACCCAGGAAAUGCUGAGA | 91.4% |
| 8364 | 3594 | AACCCAGGgAAUGCUGAGA | 0.6% |
| 8365 | 3594 | AAuCCAGGAAAUGCUGAGA | 1.0% |
| 8366 | 3594 | AACCCAaGAAAUGCUGAGA | 0.1% |
| 8367 | 3594 | AACCCAGGAAAcGCUGAGA | 0.4% |
| 8368 | 3594 | AACCCAGGAAAUaCUGAGA | 0.1% |
| 8369 | 3594 | AACCCAGGAAAUGCUGAaA | 1.0% |
| 8370 | 3594 | AACCCAGGAAAUGCUGAGu | 0.1% |
| 8371 | 3594 | AACCCAGGAAAUGCUGAag | 0.1% |
| 8372 | 3594 | AACCCAGGgAAUGCUGAGu | 0.4% |
| 8373 | 3594 | AAuCCAGGAAAUGCUGAaA | 0.1% |
| 8374 | 3594 | AAuCCAGGAAAUGCUGAGu | 0.1% |
| 8375 | 3594 | AAuCCAGGgAAUGCUGAaA | 0.1% |
| 8376 | 3594 | AAuCCuGGgAAUGCUGAGA | 0.3% |
| 8377 | 3594 | AACCCAGGAAAcGCUGAaA | 0.5% |
| 3595 | 3595 | AAAUGCUGAGAUCGAAGAU | 91.2% |
| 8378 | 3595 | AAAUGCUGAGAUuGAAGAU | 1.2% |
| 8379 | 3595 | gAAUGCUGAGAUCGAAGAU | 0.6% |
| 8380 | 3595 | gAAUGCUGAGAUuGAAGAU | 0.1% |
| 8381 | 3595 | AAAcGCUGAGAUCGAAGAU | 0.2% |
| 8382 | 3595 | AAAUaCUGAGAUCGAAGAU | 0.1% |
| 8383 | 3595 | AAAUGCUGAaAUCGAAGAU | 0.9% |
| 8384 | 3595 | AAAUGCUGAGAUaGAAGAU | 0.1% |
| 8385 | 3595 | AAAUGCUGAGuUCGAAGAU | 0.1% |
| 8386 | 3595 | AAAcGCUGAGAUuGAAGAU | 0.2% |
| 8387 | 3595 | AAAUGCUGAaAUuGAAGAU | 0.2% |
| 8388 | 3595 | gAAUGCUGAGuUCGAAGAU | 0.4% |
| 8389 | 3595 | gAAUGCUGAaAUuGAAGAU | 3.9% |
| 8390 | 3595 | gAAUGCUGAGAUuGAAGAc | 0.2% |
| 8391 | 3595 | AAAUGCUGAGuaCGAAGAU | 0.1% |
| 8392 | 3595 | AAAcGCUGAaAUuGAAGAU | 0.5% |
| 3596 | 3596 | GAAAUGCUGAGAUCGAAGA | 91.2% |
| 8393 | 3596 | GAAAUGCUGAGAUuGAAGA | 1.2% |
| 8394 | 3596 | GgAAUGCUGAGAUCGAAGA | 0.6% |
| 8395 | 3596 | GgAAUGCUGAGAUuGAAGA | 0.3% |
| 8396 | 3596 | GAAAcGCUGAGAUCGAAGA | 0.2% |
| 8397 | 3596 | GAAAUaCUGAGAUCGAAGA | 0.1% |
| 8398 | 3596 | GAAAUGCUGAaAUCGAAGA | 0.9% |
| 8399 | 3596 | GAAAUGCUGAGAUaGAAGA | 0.1% |
| 8400 | 3596 | GAAAUGCUGAGuUCGAAGA | 0.1% |
| 8401 | 3596 | GAAAcGCUGAGAUuGAAGA | 0.2% |
| 8402 | 3596 | GAAAUGCUGAaAUuGAAGA | 0.2% |
| 8403 | 3596 | GgAAUGCUGAGuUCGAAGA | 0.4% |
| 8404 | 3596 | GgAAUGCUGAaAUuGAAGA | 3.9% |
| 8405 | 3596 | GAAAUGCUGAGuaCGAAGA | 0.1% |
| 8406 | 3596 | GAAAcGCUGAaAUuGAAGA | 0.5% |
| 3597 | 3597 | GAACCCAGGAAAUGCUGAG | 91.2% |
| 8407 | 3597 | GAACCCAGGgAAUGCUGAG | 0.6% |
| 8408 | 3597 | GAAuCCAGGAAAUGCUGAG | 1.1% |
| 8409 | 3597 | aAACCCAGGAAAUGCUGAG | 0.3% |
| 8410 | 3597 | GAACCCAaGAAAUGCUGAG | 0.1% |
| 8411 | 3597 | GAACCCAGGAAAcGCUGAG | 0.4% |
| 8412 | 3597 | GAACCCAGGAAAUaCUGAG | 0.1% |
| 8413 | 3597 | GAACCCAGGAAAUGCUGAa | 1.0% |
| 8414 | 3597 | aAACCCAGGgAAUGCUGAG | 0.4% |
| 8415 | 3597 | GAAuCCAGGAAAUGCUGAa | 0.1% |
| 8416 | 3597 | aAACCCAGGAAAUGCUGAa | 0.1% |
| 8417 | 3597 | GAACCCAGGAAAcGCUGAa | 0.5% |
| 3598 | 3598 | CCAGGAAAUGCUGAGAUCG | 91.1% |
| 8418 | 3598 | CCAGGAAAUGCUGAGAUuG | 1.2% |
| 8419 | 3598 | CCAGGgAAUGCUGAGAUCG | 0.6% |
| 8420 | 3598 | CCAaGAAAUGCUGAGAUCG | 0.1% |
| 8421 | 3598 | CCAGGAAAcGCUGAGAUCG | 0.2% |
| 8422 | 3598 | CCAGGAAAUaCUGAGAUCG | 0.1% |
| 8423 | 3598 | CCAGGAAAUGCUGAaAUCG | 0.9% |
| 8424 | 3598 | CCAGGAAAUGCUGAGAUaG | 0.1% |
| 8425 | 3598 | CCAGGAAAUGCUGAGuUCG | 0.1% |
| 8426 | 3598 | CCAGGAAAcGCUGAGAUuG | 0.2% |
| 8427 | 3598 | CCAGGAAAUGCUGAaAUuG | 0.2% |
| 8428 | 3598 | CCAGGgAAUGCUGAGuUCG | 0.4% |
| 8429 | 3598 | CCAGGgAAUGCUGAaAUuG | 0.1% |
| 8430 | 3598 | CCuGGgAAUGCUGAGAUuG | 0.3% |
| 8431 | 3598 | CCAGGAAAUGCUGAGuaCG | 0.1% |
| 8432 | 3598 | CCAGGAAAcGCUGAaAUuG | 0.5% |
| 3599 | 3599 | AGGAAAUGCUGAGAUCGAA | 91.1% |
| 8433 | 3599 | AGGAAAUGCUGAGAUuGAA | 1.2% |
| 8434 | 3599 | AGGgAAUGCUGAGAUCGAA | 0.6% |
| 8435 | 3599 | AaGAAAUGCUGAGAUCGAA | 0.1% |
| 8436 | 3599 | AGGAAAcGCUGAGAUCGAA | 0.2% |
| 8437 | 3599 | AGGAAAUaCUGAGAUCGAA | 0.1% |
| 8438 | 3599 | AGGAAAUGCUGAaAUCGAA | 0.9% |
| 8439 | 3599 | AGGAAAUGCUGAGAUaGAA | 0.1% |
| 8440 | 3599 | AGGAAAUGCUGAGuUCGAA | 0.1% |
| 8441 | 3599 | AGGAAAcGCUGAGAUuGAA | 0.2% |
| 8442 | 3599 | AGGAAAUGCUGAaAUuGAA | 0.2% |
| 8443 | 3599 | AGGgAAUGCUGAGuUCGAA | 0.4% |
| 8444 | 3599 | AGGgAAUGCUGAaAUuGAA | 0.1% |
| 8445 | 3599 | UGGgAAUGCUGAGAUuGAA | 0.3% |
| 8446 | 3599 | AGGAAAUGCUGAGuaCGAA | 0.1% |
| 8447 | 3599 | AGGAAAcGCUGAaAUuGAA | 0.5% |
| 3600 | 3600 | CAGGAAAUGCUGAGAUCGA | 91.1% |
| 8448 | 3600 | CAGGAAAUGCUGAGAUuGA | 1.2% |
| 8449 | 3600 | CAGGgAAUGCUGAGAUCGA | 0.6% |
| 8450 | 3600 | CAaGAAAUGCUGAGAUCGA | 0.1% |
| 8451 | 3600 | CAGGAAAcGCUGAGAUCGA | 0.2% |
| 8452 | 3600 | CAGGAAAUaCUGAGAUCGA | 0.1% |
| 8453 | 3600 | CAGGAAAUGCUGAaAUCGA | 0.9% |
| 8454 | 3600 | CAGGAAAUGCUGAGAUaGA | 0.1% |
| 8455 | 3600 | CAGGAAAUGCUGAGuUCGA | 0.1% |
| 8456 | 3600 | CAGGAAAcGCUGAGAUuGA | 0.2% |
| 8457 | 3600 | CAGGAAAUGCUGAaAUuGA | 0.2% |
| 8458 | 3600 | CAGGgAAUGCUGAGuUCGA | 0.4% |
| 8459 | 3600 | CAGGgAAUGCUGAaAUuGA | 0.1% |
| 8460 | 3600 | CuGGgAAUGCUGAGAUuGA | 0.3% |
| 8461 | 3600 | CAGGAAAUGCUGAGuaCGA | 0.1% |
| 8462 | 3600 | CAGGAAAcGCUGAaAUuGA | 0.5% |
| 3601 | 3601 | GGAAAUGCUGAGAUCGAAG | 91.1% |
| 8463 | 3601 | GGAAAUGCUGAGAUuGAAG | 1.2% |
| 8464 | 3601 | GGgAAUGCUGAGAUCGAAG | 0.6% |
| 8465 | 3601 | GGgAAUGCUGAGAUuGAAG | 0.3% |
| 8466 | 3601 | aGAAAUGCUGAGAUCGAAG | 0.1% |
| 8467 | 3601 | GGAAAcGCUGAGAUCGAAG | 0.2% |
| 8468 | 3601 | GGAAAUaCUGAGAUCGAAG | 0.1% |
| 8469 | 3601 | GGAAAUGCUGAaAUCGAAG | 0.9% |
| 8470 | 3601 | GGAAAUGCUGAGAUaGAAG | 0.1% |
| 8471 | 3601 | GGAAAUGCUGAGuUCGAAG | 0.1% |
| 8472 | 3601 | GGAAAcGCUGAGAUuGAAG | 0.2% |
| 8473 | 3601 | GGAAAUGCUGAaAUuGAAG | 0.2% |
| 8474 | 3601 | GGgAAUGCUGAGuUCGAAG | 0.4% |
| 8475 | 3601 | GGgAAUGCUGAaAUuGAAG | 3.9% |
| 8476 | 3601 | GGAAAUGCUGAGuaCGAAG | 0.1% |
| 8477 | 3601 | GGAAAcGCUGAaAUuGAAG | 0.5% |
| 3602 | 3602 | UGGAUCAAGUGAGAGAAAG | 90.7% |
| 8478 | 3602 | UGGAUCAAGUGAGAGAgAG | 0.6% |
| 8479 | 3602 | UGGAUCAAGUGAGgGAAAG | 0.1% |
| 8480 | 3602 | UGGAUCAgGUGAGAGAAAG | 0.2% |
| 8481 | 3602 | UaGAUCAAGUGAGAGAAAG | 0.1% |
| 8482 | 3602 | UGGAcCAAGUGAGAGAAAG | 2.6% |
| 8483 | 3602 | UGGAUCAAGUaAGAGAAAG | 1.5% |
| 8484 | 3602 | UGGAUCcAGUGAGAGAAAG | 0.1% |
| 8485 | 3602 | UGGAUCAAGUGcGAGAgAG | 1.6% |
| 8486 | 3602 | UGGAUCAgGUGcGAGAAAG | 2.1% |
| 8487 | 3602 | UGGAcCAgGUGAGgGAAAG | 0.1% |
| 8488 | 3602 | UGGAcCAAGUGcGAGAgAG | 0.1% |
| 8489 | 3602 | UGGAcCAgGUGcGAGAAAG | 0.1% |
| 3603 | 3603 | UAUGAGAGAAUGUGCAACA | 90.4% |
| 8490 | 3603 | UAUGAGAGAAUGUGCAACg | 0.1% |
| 8491 | 3603 | UAUGAGAGAAUGUGCAAuA | 0.5% |
| 8492 | 3603 | UAUGAGAGgAUGUGCAACA | 0.4% |
| 8493 | 3603 | UAcGAGAGAAUGUGCAACA | 6.6% |
| 8494 | 3603 | UAUGAaAGAAUGUGCAACA | 1.1% |
| 8495 | 3603 | UAUGAuAGAAUGUGCAACA | 0.3% |
| 8496 | 3603 | UAcGAGAGgAUGUGCAACA | 0.2% |
| 8497 | 3603 | UAUGAaAGAAUGUGCAAuA | 0.4% |
| 8498 | 3603 | UAcGAaAGAAUGUGCAACA | 0.1% |
| 3604 | 3604 | AUGAGAGAAUGUGCAACAU | 90.4% |
| 8499 | 3604 | AUGAGAGAAUGUGCAACgU | 0.1% |
| 8500 | 3604 | AUGAGAGAAUGUGCAAuAU | 0.5% |
| 8501 | 3604 | AUGAGAGgAUGUGCAACAU | 0.4% |
| 8502 | 3604 | AcGAGAGAAUGUGCAACAU | 6.6% |
| 8503 | 3604 | AUGAaAGAAUGUGCAACAU | 1.1% |
| 8504 | 3604 | AUGAuAGAAUGUGCAACAU | 0.3% |
| 8505 | 3604 | AcGAGAGgAUGUGCAACAU | 0.2% |
| 8506 | 3604 | AUGAaAGAAUGUGCAAuAU | 0.4% |
| 8507 | 3604 | AcGAaAGAAUGUGCAACAU | 0.1% |
| 3605 | 3605 | GAAAAUUUCAAACAGCUGC | 90.1% |
| 8508 | 3605 | GAAAAUUUCAAACgGCUGC | 0.4% |
| 8509 | 3605 | GAAAAUUUCAgACAGCUGC | 0.3% |
| 8510 | 3605 | GgAAAUUUCAAACAGCUGC | 3.7% |
| 8511 | 3605 | GAAAgUUUCAgACAGCUGC | 0.1% |
| 8512 | 3605 | GgAAAUUUCAAgCAGCUGC | 0.1% |
| 8513 | 3605 | GgAAAUUUCAgACAGCUGC | 0.3% |
| 8514 | 3605 | GAAAACUUCAAACAGCUGC | 0.2% |
| 8515 | 3605 | GAAAAUUCCAAACAGCUGC | 0.1% |
| 8516 | 3605 | GAAAAUUUCAAACuGCUGC | 0.1% |
| 8517 | 3605 | GuAAAUUUCAAACAGCUGC | 0.1% |
| 8518 | 3605 | GgAAAUUUCAAACAGCaGC | 2.1% |
| 8519 | 3605 | GgAAAUUUCAAACuGCUGC | 0.4% |
| 8520 | 3605 | GgAAAUUUCAAACgGCaGC | 0.1% |
| 8521 | 3605 | GgAAAUUcCAAACAGCaGC | 1.9% |
| 3606 | 3606 | GGAAAAUUUCAAACAGCUG | 90.1% |
| 8522 | 3606 | GGAAAAUUUCAAACgGCUG | 0.4% |
| 8523 | 3606 | GGAAAAUUUCAgACAGCUG | 0.3% |
| 8524 | 3606 | GGgAAAUUUCAAACAGCUG | 3.7% |
| 8525 | 3606 | GGAAAgUUUCAgACAGCUG | 0.1% |
| 8526 | 3606 | GGgAAAUUUCAAgCAGCUG | 0.1% |
| 8527 | 3606 | GGgAAAUUUCAgACAGCUG | 0.3% |
| 8528 | 3606 | GGAAAAcUUCAAACAGCUG | 0.2% |
| 8529 | 3606 | GGAAAAUUcCAAACAGCUG | 0.1% |
| 8530 | 3606 | GGAAAAUUUCAAACuGCUG | 0.1% |
| 8531 | 3606 | GGuAAAUUUCAAACAGCUG | 0.1% |
| 8532 | 3606 | GGgAAAUUUCAAACAGCaG | 2.1% |
| 8533 | 3606 | GGgAAAUUUCAAACuGCUG | 0.4% |
| 8534 | 3606 | GGgAAAUUUCAAACgGCaG | 0.1% |
| 8535 | 3606 | GGgAAAUUcCAAACAGCaG | 1.9% |
| 3607 | 3607 | AAAGGAAAAUUUCAAACAG | 90.0% |
| 8536 | 3607 | AAAGGAAAAUUUCAAACgG | 0.4% |
| 8537 | 3607 | AAAGGAAAAUUUCAgACAG | 0.3% |
| 8538 | 3607 | AAAGGgAAAUUUCAAACAG | 5.8% |
| 8539 | 3607 | AAgGGAAAAUUUCAAACAG | 0.1% |
| 8540 | 3607 | AAAGGAAAgUUUCAgACAG | 0.1% |
| 8541 | 3607 | AAAGGgAAAUUUCAAACgG | 0.1% |
| 8542 | 3607 | AAAGGgAAAUUUCAAgCAG | 0.1% |
| 8543 | 3607 | AAAGGgAAAUUUCAgACAG | 0.3% |
| 8544 | 3607 | AAAGGAAAAcUUCAAACAG | 0.2% |
| 8545 | 3607 | AAAGGAAAAUUcCAAACAG | 0.1% |
| 8546 | 3607 | AAAGGAAAAUUUCAAACuG | 0.1% |
| 8547 | 3607 | AAAGGuAAAUUUCAAACAG | 0.1% |
| 8548 | 3607 | AAAGGgAAAUUcCAAACAG | 1.9% |
| 8549 | 3607 | AAAGGgAAAUUUCAAACuG | 0.4% |
| 8550 | 3607 | AAAGGgAAAUUUCAgACcG | 0.1% |
| 3608 | 3608 | AGGAAAAUUUCAAACAGCU | 90.0% |
| 8551 | 3608 | AGGAAAAUUUCAAACgGCU | 0.4% |
| 8552 | 3608 | AGGAAAAUUUCAgACAGCU | 0.3% |
| 8553 | 3608 | AGGgAAAUUUCAAACAGCU | 3.7% |
| 8554 | 3608 | gGGAAAAUUUCAAACAGCU | 0.1% |
| 8555 | 3608 | AGGAAAgUUUCAgACAGCU | 0.1% |
| 8556 | 3608 | AGGgAAAUUUCAAgCAGCU | 0.1% |
| 8557 | 3608 | AGGgAAAUUUCAgACAGCU | 0.3% |
| 8558 | 3608 | AGGAAAAcUUCAAACAGCU | 0.2% |
| 8559 | 3608 | AGGAAAAUUcCAAACAGCU | 0.1% |
| 8560 | 3608 | AGGAAAAUUUCAAACuGCU | 0.1% |
| 8561 | 3608 | AGGuAAAUUUCAAACAGCU | 0.1% |
| 8562 | 3608 | AGGgAAAUUUCAAACAGCa | 2.1% |
| 8563 | 3608 | AGGgAAAUUUCAAACuGCU | 0.4% |
| 8564 | 3608 | AGGgAAAUUUCAAACgGCa | 0.1% |
| 8565 | 3608 | AGGgAAAUUcCAAACAGCa | 1.9% |
| 3609 | 3609 | AAGGAAAAUUUCAAACAGC | 90.0% |
| 8566 | 3609 | AAGGAAAAUUUCAAACgGC | 0.4% |
| 8567 | 3609 | AAGGAAAAUUUCAgACAGC | 0.3% |
| 8568 | 3609 | AAGGgAAAUUUCAAACAGC | 5.8% |
| 8569 | 3609 | AgGGAAAAUUUCAAACAGC | 0.1% |
| 8570 | 3609 | AAGGAAAgUUUCAgACAGC | 0.1% |
| 8571 | 3609 | AAGGgAAAUUUCAAACgGC | 0.1% |
| 8572 | 3609 | AAGGgAAAUUUCAAgCAGC | 0.1% |
| 8573 | 3609 | AAGGgAAAUUUCAgACAGC | 0.3% |
| 8574 | 3609 | AAGGAAAAcUUCAAACAGC | 0.2% |
| 8575 | 3609 | AAGGAAAAUUcCAAACAGC | 0.1% |
| 8576 | 3609 | AAGGAAAAUUUCAAACuGC | 0.1% |
| 8577 | 3609 | AAGGuAAAUUUCAAACAGC | 0.1% |
| 8578 | 3609 | AAGGgAAAUUcCAAACAGC | 1.9% |
| 8579 | 3609 | AAGGgAAAUUUCAAACuGC | 0.4% |
| 8580 | 3609 | AAGGgAAAUUUCAgACcGC | 0.1% |
| 3610 | 3610 | CCCAGGAAAUGCUGAGAUC | 90.0% |
| 8581 | 3610 | CCCAGGAAAUGCUGAGAUu | 1.2% |
| 8582 | 3610 | CCCAGGgAAUGCUGAGAUC | 0.6% |
| 8583 | 3610 | uCCAGGAAAUGCUGAGAUC | 1.0% |
| 8584 | 3610 | CCCAaGAAAUGCUGAGAUC | 0.1% |
| 8585 | 3610 | CCCAGGAAAcGCUGAGAUC | 0.2% |
| 8586 | 3610 | CCCAGGAAAUaCUGAGAUC | 0.1% |
| 8587 | 3610 | CCCAGGAAAUGCUGAaAUC | 0.9% |
| 8588 | 3610 | CCCAGGAAAUGCUGAGAUa | 0.1% |
| 8589 | 3610 | CCCAGGAAAcGCUGAGAUu | 0.2% |
| 8590 | 3610 | CCCAGGAAAUGCUGAaAUu | 0.1% |
| 8591 | 3610 | CCCAGGgAAUGCUGAGuUC | 0.4% |
| 8592 | 3610 | uCCAGGAAAUGCUGAGuUC | 0.1% |
| 8593 | 3610 | uCCAGGAAAUGCUGAaAUu | 0.1% |
| 8594 | 3610 | CCCAGGAAAUGCUGAGuaC | 0.1% |
| 8595 | 3610 | CCCAGGAAAcGCUGAaAUu | 0.5% |

TABLE 20-5

Conserved and minor variant 19-mer sequences
from the Influenza A segment 7 (M1 & M2) se-
quences listed in Table 1-7. The conserved se-
quences match at least 89% of the listed viral
sequences, and the variants contain 3 or fewer
nucleotide changes from the reference sequence.

| | | | |
|---|---|---|---|
| Seq ID | Ref ID | Match Seq | % Total |

| | | | |
|---|---|---|---|
| 4427 | 4427 | UUCACGCUCACCGUGCCCA | 99.2% |
| 8596 | 4427 | UUCACGCUCACCGUGCCuA | 0.1% |
| 8597 | 4427 | UUCACGCUCACuGUGCCCA | 0.2% |
| 8598 | 4427 | UUCACaCUCACCGUGCCCA | 0.2% |
| 8599 | 4427 | UUCACGCUCACCGUGCCaA | 0.2% |
| 4428 | 4428 | CAGGCCCCCUCAAAGCCGA | 99.0% |
| 8600 | 4428 | CgGGCCCCCUCAAAGCCGA | 0.2% |
| 8601 | 4428 | uAGGCCCCCUCAAAGCCGA | 0.1% |
| 8602 | 4428 | CAGGCCCCCUCAAAGCCcA | 0.5% |
| 8603 | 4428 | CcGGCCCCCUCAAAGCCGA | 0.2% |
| 4429 | 4429 | UCAGGCCCCCUCAAAGCCG | 99.0% |
| 8604 | 4429 | UCgGGCCCCCUCAAAGCCG | 0.2% |
| 8605 | 4429 | UuAGGCCCCCUCAAAGCCG | 0.1% |
| 8606 | 4429 | UCAGGCCCCCUCAAAGCCc | 0.5% |
| 8607 | 4429 | UCcGGCCCCCUCAAAGCCG | 0.2% |
| 4430 | 4430 | UCACGCUCACCGUGCCCAG | 98.9% |
| 8608 | 4430 | UCACGCUCACCGUGCCuAG | 0.1% |
| 8609 | 4430 | UCACGCUCACuGUGCCCAG | 0.2% |
| 8610 | 4430 | UCACaCUCACCGUGCCCAG | 0.2% |
| 8611 | 4430 | UCACGCUCACCGUGCCaAG | 0.2% |
| 8612 | 4430 | UCACGCUCACCGUGCCCAc | 0.3% |
| 4431 | 4431 | CACGCUCACCGUGCCCAGU | 98.8% |
| 8613 | 4431 | CACGCUCACCGUGCCuAGU | 0.1% |
| 8614 | 4431 | CACGCUCACuGUGCCCAGU | 0.2% |
| 8615 | 4431 | CACaCUCACCGUGCCCAGU | 0.2% |
| 8616 | 4431 | CACGCUCACCGUGCCaAGU | 0.2% |
| 8617 | 4431 | CACGCUCACCGUGCCCAcU | 0.3% |
| 8618 | 4431 | CACGCUCACCGUGCCCAGc | 0.1% |
| 4432 | 4432 | CGCUCACCGUGCCCAGUGA | 98.8% |
| 8619 | 4432 | CGCUCACCGUGCCuAGUGA | 0.1% |
| 8620 | 4432 | CGCUCACuGUGCCCAGUGA | 0.2% |
| 8621 | 4432 | CaCUCACCGUGCCCAGUGA | 0.2% |
| 8622 | 4432 | CGCUCACCGUGCCaAGUGA | 0.2% |
| 8623 | 4432 | CGCUCACCGUGCCCAcUGA | 0.3% |
| 8624 | 4432 | CGCUCACCGUGCCCAGcGA | 0.1% |
| 8625 | 4432 | CGCUCACCGUGCCCAGUaA | 0.1% |
| 4433 | 4433 | ACGCUCACCGUGCCCAGUG | 98.8% |
| 8626 | 4433 | ACGCUCACCGUGCCuAGUG | 0.1% |
| 8627 | 4433 | ACGCUCACuGUGCCCAGUG | 0.2% |
| 8628 | 4433 | ACaCUCACCGUGCCCAGUG | 0.2% |
| 8629 | 4433 | ACGCUCACCGUGCCaAGUG | 0.2% |
| 8630 | 4433 | ACGCUCACCGUGCCCAcUG | 0.3% |
| 8631 | 4433 | ACGCUCACCGUGCCCAGcG | 0.1% |
| 8632 | 4433 | ACGCUCACCGUGCCCAGUa | 0.1% |
| 4434 | 4434 | UCACCGUGCCCAGUGAGCG | 98.7% |
| 8633 | 4434 | UCACCGUGCCuAGUGAGCG | 0.1% |
| 8634 | 4434 | UCACuGUGCCCAGUGAGCG | 0.2% |
| 8635 | 4434 | UCACCGUGCCaAGUGAGCG | 0.2% |
| 8636 | 4434 | UCACCGUGCCCAcUGAGCG | 0.3% |
| 8637 | 4434 | UCACCGUGCCCAGcGAGCG | 0.1% |
| 8638 | 4434 | UCACCGUGCCCAGUaAGCG | 0.1% |
| 8639 | 4434 | UCACCGUGCCCAGUGAaCG | 0.3% |
| 4435 | 4435 | CUCACCGUGCCCAGUGAGC | 98.7% |
| 8640 | 4435 | CUCACCGUGCCuAGUGAGC | 0.1% |
| 8641 | 4435 | CUCACuGUGCCCAGUGAGC | 0.2% |
| 8642 | 4435 | CUCACCGUGCCaAGUGAGC | 0.2% |
| 8643 | 4435 | CUCACCGUGCCCAcUGAGC | 0.3% |
| 8644 | 4435 | CUCACCGUGCCCAGcGAGC | 0.1% |
| 8645 | 4435 | CUCACCGUGCCCAGUaAGC | 0.1% |
| 8646 | 4435 | CUCACCGUGCCCAGUGAaC | 0.3% |
| 4436 | 4436 | GCUCACCGUGCCCAGUGAG | 98.5% |
| 8647 | 4436 | GCUCACCGUGCCuAGUGAG | 0.1% |
| 8648 | 4436 | GCUCACuGUGCCCAGUGAG | 0.2% |
| 8649 | 4436 | aCUCACCGUGCCCAGUGAG | 0.2% |
| 8650 | 4436 | GCUCACCGUGCCaAGUGAG | 0.2% |
| 8651 | 4436 | GCUCACCGUGCCCAcUGAG | 0.3% |
| 8652 | 4436 | GCUCACCGUGCCCAGcGAG | 0.1% |
| 8653 | 4436 | GCUCACCGUGCCCAGUaAG | 0.1% |
| 8654 | 4436 | GCUCACCGUGCCCAGUGAa | 0.3% |
| 4437 | 4437 | AUCUUGAGGCUCUCAUGGA | 96.4% |
| 8655 | 4437 | AUCUUGAGGuUCUCAUGGA | 0.9% |
| 8656 | 4437 | AcCUUGAGGCUCUCAUGGA | 0.3% |
| 8657 | 4437 | AUCUaGAGGCUCUCAUGGA | 0.1% |
| 8658 | 4437 | AUCUcGAGGCUCUCAUGGA | 1.6% |
| 8659 | 4437 | AUCUUGAaGCUCUCAUGGA | 0.1% |
| 8660 | 4437 | AUCUUGAGGCaCUCAUGGA | 0.3% |
| 8661 | 4437 | AUCUUGAGGCUCUaAUGGA | 0.1% |
| 8662 | 4437 | AUCUUGAGGCUCUCAcGGA | 0.1% |
| 8663 | 4437 | AUCUUGAGGuUCUCAcGGA | 0.1% |
| 4438 | 4438 | GAUCUUGAGGCUCUCAUGG | 96.4% |
| 8664 | 4438 | GAUCUUGAGGuUCUCAUGG | 0.9% |
| 8665 | 4438 | GAcCUUGAGGCUCUCAUGG | 0.3% |
| 8666 | 4438 | GAUCUaGAGGCUCUCAUGG | 0.1% |
| 8667 | 4438 | GAUCUcGAGGCUCUCAUGG | 1.6% |
| 8668 | 4438 | GAUCUUGAaGCUCUCAUGG | 0.1% |
| 8669 | 4438 | GAUCUUGAGGCaCUCAUGG | 0.3% |
| 8670 | 4438 | GAUCUUGAGGCUCUaAUGG | 0.1% |
| 8671 | 4438 | GAUCUUGAGGCUCUCAcGG | 0.1% |
| 8672 | 4438 | GAUCUUGAGGuUCUCAcGG | 0.1% |
| 4439 | 4439 | UGUCACCUCUGACUAAGGG | 96.3% |
| 8673 | 4439 | UGUCACCUCUGACUAgGGG | 0.1% |
| 8674 | 4439 | UGUCACCUCUaACUAAGGG | 0.9% |
| 8675 | 4439 | UGUCACCUCUGACaAAGGG | 0.4% |
| 8676 | 4439 | UGUCACCUCUGACcAAGGG | 0.3% |
| 8677 | 4439 | UGUCACCUCUGACUAAaGG | 2.0% |
| 8678 | 4439 | UGUCACCUCUuACUAAGGG | 0.1% |
| 4440 | 4440 | CUGUCACCUCUGACUAAGG | 96.3% |
| 8679 | 4440 | CUGUCACCUCUGACUAgGG | 0.1% |
| 8680 | 4440 | CUGUCACCUCUaACUAAGG | 0.9% |
| 8681 | 4440 | CUGUCACCUCUGACaAAGG | 0.4% |
| 8682 | 4440 | CUGUCACCUCUGACcAAGG | 0.3% |
| 8683 | 4440 | CUGUCACCUCUGACUAAaG | 1.9% |
| 8684 | 4440 | CUGUCACCUCUuACUAAGG | 0.1% |
| 8685 | 4440 | uUGUCACCUCUGACUAAaG | 0.1% |
| 4441 | 4441 | GACUGCAGCGUAGACGCUU | 95.6% |
| 8686 | 4441 | GACUGCAGCGUAGACGuUU | 0.2% |
| 8687 | 4441 | GACUGCAaCGUAGACGCUU | 1.7% |
| 8688 | 4441 | GACUGCAGCGUAaACGCUU | 0.1% |
| 8689 | 4441 | GACUGCAGCGUAcACGCUU | 0.1% |
| 8690 | 4441 | GACUGCAGCGUAGACGaUU | 1.5% |
| 8691 | 4441 | GACUGCAGCGUAGACGgUU | 0.3% |
| 8692 | 4441 | GACUGCAGCGUAuACGCUU | 0.2% |
| 8693 | 4441 | GACUGCAaCGUAuACGCUU | 0.1% |
| 8694 | 4441 | GACUGCAGCGUAuACGaUU | 0.1% |
| 4442 | 4442 | GGACUGCAGCGUAGACGCU | 95.6% |
| 8695 | 4442 | GGACUGCAGCGUAGACGuU | 0.2% |
| 8696 | 4442 | GGACUGCAaCGUAGACGCU | 1.7% |
| 8697 | 4442 | GGACUGCAGCGUAaACGCU | 0.1% |
| 8698 | 4442 | GGACUGCAGCGUAcACGCU | 0.1% |
| 8699 | 4442 | GGACUGCAGCGUAGACGaU | 1.5% |
| 8700 | 4442 | GGACUGCAGCGUAGACGgU | 0.3% |
| 8701 | 4442 | GGACUGCAGCGUAuACGCU | 0.2% |
| 8702 | 4442 | GGACUGCAaCGUAuACGCU | 0.1% |
| 8703 | 4442 | GGACUGCAGCGUAuACGaU | 0.1% |
| 4443 | 4443 | UGCAGCGUAGACGCUUUGU | 95.5% |
| 8704 | 4443 | UGCAGCGUAGACGuUUUGU | 0.2% |
| 8705 | 4443 | UGCAaCGUAGACGCUUUGU | 1.7% |
| 8706 | 4443 | UGCAGCGUAaACGCUUUGU | 0.1% |
| 8707 | 4443 | UGCAGCGUAcACGCUUUGU | 0.1% |
| 8708 | 4443 | UGCAGCGUAGACGaUUUGU | 1.5% |
| 8709 | 4443 | UGCAGCGUAGACGCUUcGU | 0.1% |
| 8710 | 4443 | UGCAGCGUAGACGgUUUGU | 0.3% |
| 8711 | 4443 | UGCAGCGUAuACGCUUUGU | 0.2% |
| 8712 | 4443 | UGCAaCGUAuACGCUUUGU | 0.1% |
| 8713 | 4443 | UGCAGCGUAuACGaUUUGU | 0.1% |
| 4444 | 4444 | ACUGCAGCGUAGACGCUUU | 95.5% |
| 8714 | 4444 | ACUGCAGCGUAGACGuUUU | 0.2% |
| 8715 | 4444 | ACUGCAaCGUAGACGCUUU | 1.7% |
| 8716 | 4444 | ACUGCAGCGUAaACGCUUU | 0.1% |
| 8717 | 4444 | ACUGCAGCGUAcACGCUUU | 0.1% |
| 8718 | 4444 | ACUGCAGCGUAGACGaUUU | 1.5% |
| 8719 | 4444 | ACUGCAGCGUAGACGCUUc | 0.1% |
| 8720 | 4444 | ACUGCAGCGUAGACGgUUU | 0.3% |
| 8721 | 4444 | ACUGCAGCGUAuACGCUUU | 0.2% |
| 8722 | 4444 | ACUGCAaCGUAuACGCUUU | 0.1% |
| 8723 | 4444 | ACUGCAGCGUAuACGaUUU | 0.1% |
| 4445 | 4445 | CUGCAGCGUAGACGCUUUG | 95.5% |
| 8724 | 4445 | CUGCAGCGUAGACGuUUUG | 0.2% |
| 8725 | 4445 | CUGCAaCGUAGACGCUUUG | 1.7% |
| 8726 | 4445 | CUGCAGCGUAaACGCUUUG | 0.1% |
| 8727 | 4445 | CUGCAGCGUAcACGCUUUG | 0.1% |
| 8728 | 4445 | CUGCAGCGUAGACGaUUUG | 1.5% |
| 8729 | 4445 | CUGCAGCGUAGACGCUUcG | 0.1% |
| 8730 | 4445 | CUGCAGCGUAGACGgUUUG | 0.3% |
| 8731 | 4445 | CUGCAGCGUAuACGCUUUG | 0.2% |
| 8732 | 4445 | CUGCAaCGUAuACGCUUUG | 0.1% |
| 8733 | 4445 | CUGCAGCGUAuACGaUUUG | 0.1% |
| 4446 | 4446 | GCUAUGGAGCAAAUGGCUG | 95.4% |
| 8734 | 4446 | GCcAUGGAGCAAAUGGCUG | 0.4% |
| 8735 | 4446 | GCUAUGGAaCAAAUGGCUG | 0.4% |
| 8736 | 4446 | GCUAUGGAGCAcAUGGCUG | 0.1% |
| 8737 | 4446 | GCcAUGGAGCAgAUGGCUG | 1.5% |
| 8738 | 4446 | GCUAUGGAGCAgAUGGCaG | 0.3% |
| 8739 | 4446 | GCUAUGGAGCAgAUGGCgG | 1.3% |
| 8740 | 4446 | GCUAUGGAaCAgAUGGuUG | 0.1% |
| 8741 | 4446 | GCcAUGGAaCAAAUGGCUG | 0.4% |
| 8742 | 4446 | GCcAUGGAGCAgAUGGCaG | 0.1% |
| 4447 | 4447 | UGGCUAAAGACAAGACCAA | 95.4% |
| 8743 | 4447 | UGGCUAAAGACAAGACCgA | 3.5% |
| 8744 | 4447 | UGGCUAAAGACAAGgCCAA | 0.4% |
| 8745 | 4447 | UGGCUgAAGACAAGACCAA | 0.1% |
| 8746 | 4447 | UGGuUAAAGACAAGACCgA | 0.1% |
| 8747 | 4447 | UGGCUAAAGACAAaACCAA | 0.2% |
| 8748 | 4447 | UGGCUAAAGACAAGACCcA | 0.1% |
| 8749 | 4447 | UGGCUAAAGACAAGACCuA | 0.1% |
| 8750 | 4447 | UGGCUAAAGACuAGACCuA | 0.2% |
| 4448 | 4448 | CAGCGUAGACGCUUUGUCC | 95.4% |
| 8751 | 4448 | CAGCGUAGACGCUUUGUuC | 0.1% |
| 8752 | 4448 | CAGCGUAGACGuUUUGUCC | 0.2% |
| 8753 | 4448 | CAaCGUAGACGCUUUGUCC | 1.5% |
| 8754 | 4448 | CAGCGUAaACGCUUUGUCC | 0.1% |
| 8755 | 4448 | CAGCGUAcACGCUUUGUCC | 0.1% |
| 8756 | 4448 | CAGCGUAGACGaUUUGUCC | 1.5% |
| 8757 | 4448 | CAGCGUAGACGCUUcGUCC | 0.1% |
| 8758 | 4448 | CAGCGUAGACGgUUUGUCC | 0.3% |
| 8759 | 4448 | CAGCGUAuACGCUUUGUCC | 0.2% |
| 8760 | 4448 | CAaCGUAGACGCUUUGUuC | 0.2% |
| 8761 | 4448 | CAaCGUAuACGCUUUGUCC | 0.1% |
| 8762 | 4448 | CAGCGUAuACGaUUUGUCC | 0.1% |
| 4449 | 4449 | CUAUGGAGCAAAUGGCUGG | 95.4% |
| 8763 | 4449 | CcAUGGAGCAAAUGGCUGG | 0.4% |
| 8764 | 4449 | CUAUGGAaCAAAUGGCUGG | 0.4% |
| 8765 | 4449 | CUAUGGAGCAcAUGGCUGG | 0.1% |
| 8766 | 4449 | CcAUGGAGCAgAUGGCUGG | 1.5% |
| 8767 | 4449 | CUAUGGAGCAgAUGGCaGG | 0.3% |
| 8768 | 4449 | CUAUGGAGCAgAUGGCgGG | 1.3% |
| 8769 | 4449 | CUAUGGAaCAgAUGGuUGG | 0.1% |
| 8770 | 4449 | CcAUGGAaCAAAUGGCUGG | 0.4% |
| 8771 | 4449 | CcAUGGAGCAgAUGGCaGG | 0.1% |
| 4450 | 4450 | AGCGUAGACGCUUUGUCCA | 95.4% |
| 8772 | 4450 | AGCGUAGACGCUUUGUuCA | 0.1% |
| 8773 | 4450 | AGCGUAGACGuUUUGUCCA | 0.2% |
| 8774 | 4450 | AaCGUAGACGCUUUGUCCA | 1.5% |
| 8775 | 4450 | AGCGUAaACGCUUUGUCCA | 0.1% |
| 8776 | 4450 | AGCGUAcACGCUUUGUCCA | 0.1% |
| 8777 | 4450 | AGCGUAGACGaUUUGUCCA | 1.5% |
| 8778 | 4450 | AGCGUAGACGCUUcGUCCA | 0.1% |
| 8779 | 4450 | AGCGUAGACGgUUUGUCCA | 0.3% |
| 8780 | 4450 | AGCGUAuACGCUUUGUCCA | 0.2% |
| 8781 | 4450 | AaCGUAGACGCUUUGUuCA | 0.2% |
| 8782 | 4450 | AaCGUAuACGCUUUGUCCA | 0.1% |
| 8783 | 4450 | AGCGUAuACGaUUUGUCCA | 0.1% |
| 4451 | 4451 | GCAGCGUAGACGCUUUGUC | 95.4% |
| 8784 | 4451 | GCAGCGUAGACGCUUUGUu | 0.1% |
| 8785 | 4451 | GCAGCGUAGACGuUUUGUC | 0.2% |
| 8786 | 4451 | GCAaCGUAGACGCUUUGUC | 1.5% |
| 8787 | 4451 | GCAGCGUAaACGCUUUGUC | 0.1% |
| 8788 | 4451 | GCAGCGUAcACGCUUUGUC | 0.1% |
| 8789 | 4451 | GCAGCGUAGACGaUUUGUC | 1.5% |
| 8790 | 4451 | GCAGCGUAGACGCUUcGUC | 0.1% |
| 8791 | 4451 | GCAGCGUAGACGgUUUGUC | 0.3% |
| 8792 | 4451 | GCAGCGUAuACGCUUUGUC | 0.2% |
| 8793 | 4451 | GCAaCGUAGACGCUUUGUu | 0.2% |
| 8794 | 4451 | GCAaCGUAuACGCUUUGUC | 0.1% |
| 8795 | 4451 | GCAGCGUAuACGaUUUGUC | 0.1% |
| 4452 | 4452 | GGCUAAAGACAAGACCAAU | 95.4% |
| 8796 | 4452 | GGCUAAAGACAAGACCgAU | 3.5% |
| 8797 | 4452 | GGCUAAAGACAAGgCCAAU | 0.4% |
| 8798 | 4452 | GGCUgAAGACAAGACCAAU | 0.1% |
| 8799 | 4452 | GGuUAAAGACAAGACCgAU | 0.1% |
| 8800 | 4452 | GGCUAAAGACAAaACCAAU | 0.2% |
| 8801 | 4452 | GGCUAAAGACAAGACCcAU | 0.1% |
| 8802 | 4452 | GGCUAAAGACAAGACCuAU | 0.1% |
| 8803 | 4452 | GGCUAAAGACuAGACCuAU | 0.2% |
| 4453 | 4453 | CGUAGACGCUUUGUCCAAA | 94.9% |
| 8804 | 4453 | CGUAGACGCUUUGUCCAgA | 2.0% |
| 8805 | 4453 | CGUAGACGCUUUGUuCAAA | 0.3% |
| 8806 | 4453 | CGUAGACGuUUUGUCCAAA | 0.2% |
| 8807 | 4453 | CGUAcACGCUUUGUCCAAA | 0.1% |
| 8808 | 4453 | CGUAGACGaUUUGUCCAAA | 1.5% |
| 8809 | 4453 | CGUAGACGCUUcGUCCAAA | 0.1% |
| 8810 | 4453 | CGUAGACGgUUUGUCCAAA | 0.3% |
| 8811 | 4453 | CGUAuACGCUUUGUCCAAA | 0.3% |
| 8812 | 4453 | CGUAaACGCUUUGUCCAgA | 0.1% |
| 8813 | 4453 | CGUAcACuCUUUGUCCAAA | 0.1% |
| 8814 | 4453 | CGUAuACGaUUUGUCCAAA | 0.1% |
| 4454 | 4454 | GUAGACGCUUUGUCCAAAA | 94.9% |
| 8815 | 4454 | GUAGACGCUUUGUCCAgAA | 2.0% |
| 8816 | 4454 | GUAGACGCUUUGUuCAAAA | 0.3% |
| 8817 | 4454 | GUAGACGuUUUGUCCAAAA | 0.2% |
| 8818 | 4454 | GUAcACGCUUUGUCCAAAA | 0.1% |
| 8819 | 4454 | GUAGACGaUUUGUCCAAAA | 1.5% |
| 8820 | 4454 | GUAGACGCUUcGUCCAAAA | 0.1% |
| 8821 | 4454 | GUAGACGgUUUGUCCAAAA | 0.3% |
| 8822 | 4454 | GUAuACGCUUUGUCCAAAA | 0.3% |
| 8823 | 4454 | GUAaACGCUUUGUCCAgAA | 0.1% |
| 8824 | 4454 | GUAcACuCUUUGUCCAAAA | 0.1% |
| 8825 | 4454 | GUAuACGaUUUGUCCAAAA | 0.1% |
| 4455 | 4455 | AGACGCUUUGUCCAAAAUG | 94.8% |
| 8826 | 4455 | AGACGCUUUGUCCAgAAUG | 1.3% |
| 8827 | 4455 | AGACGCUUUGUuCAAAAUG | 0.3% |
| 8828 | 4455 | AGACGuUUUGUCCAAAAUG | 0.2% |
| 8829 | 4455 | AcACGCUUUGUCCAAAAUG | 0.1% |
| 8830 | 4455 | AGACGaUUUGUCCAAAAUG | 1.5% |
| 8831 | 4455 | AGACGCUUcGUCCAAAAUG | 0.1% |
| 8832 | 4455 | AGACGCUUUGUCCAAAAcG | 0.1% |
| 8833 | 4455 | AGACGgUUUGUCCAAAAUG | 0.3% |
| 8834 | 4455 | AuACGCUUUGUCCAAAAUG | 0.3% |
| 8835 | 4455 | AaACGCUUUGUCCAgAAUG | 0.1% |
| 8836 | 4455 | AGACGCUUUGUCCAgAAcG | 0.7% |
| 8837 | 4455 | AcACuCUUUGUCCAAAAUG | 0.1% |
| 8838 | 4455 | AuACGaUUUGUCCAAAAUG | 0.1% |
| 4456 | 4456 | UAGACGCUUUGUCCAAAAU | 94.8% |
| 8839 | 4456 | UAGACGCUUUGUCCAgAAU | 1.3% |
| 8840 | 4456 | UAGACGCUUUGUuCAAAAU | 0.3% |
| 8841 | 4456 | UAGACGuUUUGUCCAAAAU | 0.2% |
| 8842 | 4456 | UAcACGCUUUGUCCAAAAU | 0.1% |
| 8843 | 4456 | UAGACGaUUUGUCCAAAAU | 1.5% |
| 8844 | 4456 | UAGACGCUUcGUCCAAAAU | 0.1% |
| 8845 | 4456 | UAGACGCUUUGUCCAAAAc | 0.1% |
| 8846 | 4456 | UAGACGgUUUGUCCAAAAU | 0.3% |
| 8847 | 4456 | UAuACGCUUUGUCCAAAAU | 0.3% |
| 8848 | 4456 | UAaACGCUUUGUCCAgAAU | 0.1% |
| 8849 | 4456 | UAGACGCUUUGUCCAgAAc | 0.7% |
| 8850 | 4456 | UAcACuCUUUGUCCAAAAU | 0.1% |
| 8851 | 4456 | UAuACGaUUUGUCCAAAAU | 0.1% |
| 4457 | 4457 | GACGCUUUGUCCAAAAUGC | 94.7% |
| 8852 | 4457 | GACGCUUUGUCCAAAAUGu | 0.1% |
| 8853 | 4457 | GACGCUUUGUCCAgAAUGC | 1.3% |
| 8854 | 4457 | GACGCUUUGUuCAAAAUGC | 0.3% |
| 8855 | 4457 | GACGuUUUGUCCAAAAUGC | 0.2% |
| 8856 | 4457 | cACGCUUUGUCCAAAAUGC | 0.1% |
| 8857 | 4457 | GACGaUUUGUCCAAAAUGC | 1.5% |
| 8858 | 4457 | GACGCUUcGUCCAAAAUGC | 0.1% |
| 8859 | 4457 | GACGCUUUGUCCAAAAcGC | 0.1% |
| 8860 | 4457 | GACGgUUUGUCCAAAAUGC | 0.3% |
| 8861 | 4457 | uACGCUUUGUCCAAAAUGC | 0.3% |
| 8862 | 4457 | aACGCUUUGUCCAgAAUGC | 0.1% |
| 8863 | 4457 | GACGCUUUGUCCAgAAcGC | 0.7% |
| 8864 | 4457 | cACuCUUUGUCCAAAAUGC | 0.1% |
| 8865 | 4457 | uACGaUUUGUCCAAAAUGC | 0.1% |
| 4458 | 4458 | ACGCUUUGUCCAAAAUGCC | 94.3% |
| 8866 | 4458 | ACGCUUUGUCCAAAAUGCu | 0.6% |
| 8867 | 4458 | ACGCUUUGUCCAAAAUGuC | 0.1% |
| 8868 | 4458 | ACGCUUUGUCCAgAAUGCC | 1.4% |
| 8869 | 4458 | ACGCUUUGUuCAAAAUGCC | 0.3% |
| 8870 | 4458 | ACGuUUUGUCCAAAAUGCC | 0.2% |
| 8871 | 4458 | ACGaUUUGUCCAAAAUGCC | 1.6% |
| 8872 | 4458 | ACGCUUcGUCCAAAAUGCC | 0.1% |
| 8873 | 4458 | ACGCUUUGUCCAAAAcGCC | 0.1% |
| 8874 | 4458 | ACGCUUUGUCCAAAAUGCa | 0.2% |
| 8875 | 4458 | ACGgUUUGUCCAAAAUGCC | 0.3% |
| 8876 | 4458 | ACuCUUUGUCCAAAAUGCC | 0.1% |
| 8877 | 4458 | ACGCUUUGUCCAgAAcGCC | 0.7% |
| 4459 | 4459 | GCUUUGUCCAAAAUGCCCU | 94.3% |
| 8878 | 4459 | GCUUUGUCCAAAAUGCuCU | 0.6% |
| 8879 | 4459 | GCUUUGUCCAAAAUGuCCU | 0.1% |
| 8880 | 4459 | GCUUUGUCCAgAAUGCCCU | 1.4% |
| 8881 | 4459 | GCUUUGUuCAAAAUGCCCU | 0.3% |
| 8882 | 4459 | GuUUUGUCCAAAAUGCCCU | 0.2% |
| 8883 | 4459 | GaUUUGUCCAAAAUGCCCU | 1.6% |
| 8884 | 4459 | GCUUcGUCCAAAAUGCCCU | 0.1% |
| 8885 | 4459 | GCUUUGUCCAAAAcGCCCU | 0.1% |
| 8886 | 4459 | GCUUUGUCCAAAAUGCaCU | 0.2% |
| 8887 | 4459 | GgUUUGUCCAAAAUGCCCU | 0.3% |
| 8888 | 4459 | uCUUUGUCCAAAAUGCCCU | 0.1% |
| 8889 | 4459 | GCUUUGUCCAgAAcGCCCU | 0.7% |
| 4460 | 4460 | CGCUUUGUCCAAAAUGCCC | 94.3% |
| 8890 | 4460 | CGCUUUGUCCAAAAUGCuC | 0.6% |
| 8891 | 4460 | CGCUUUGUCCAAAAUGuCC | 0.1% |
| 8892 | 4460 | CGCUUUGUCCAgAAUGCCC | 1.4% |
| 8893 | 4460 | CGCUUUGUuCAAAAUGCCC | 0.3% |
| 8894 | 4460 | CGuUUUGUCCAAAAUGCCC | 0.2% |
| 8895 | 4460 | CGaUUUGUCCAAAAUGCCC | 1.6% |
| 8896 | 4460 | CGCUUcGUCCAAAAUGCCC | 0.1% |
| 8897 | 4460 | CGCUUUGUCCAAAAcGCCC | 0.1% |
| 8898 | 4460 | CGCUUUGUCCAAAAUGCaC | 0.2% |
| 8899 | 4460 | CGgUUUGUCCAAAAUGCCC | 0.3% |
| 8900 | 4460 | CuCUUUGUCCAAAAUGCCC | 0.1% |
| 8901 | 4460 | CGCUUUGUCCAgAAcGCCC | 0.7% |
| 4461 | 4461 | UCAGUUAUUCUGCUGGUGC | 94.2% |
| 8902 | 4461 | UCgGUUAUUCUGCUGGUGC | 0.1% |
| 8903 | 4461 | UuAGUUAUUCUGCUGGUGC | 0.5% |
| 8904 | 4461 | UCAGcUAUUCUGCUGGUGC | 0.2% |
| 8905 | 4461 | UCAGUUAcUCUGCUGGUGC | 1.0% |
| 8906 | 4461 | UCAGUUAUUCcGCUGGUGC | 0.1% |
| 8907 | 4461 | UCAGUUAUUCgGCUGGUGC | 0.1% |
| 8908 | 4461 | UCAGUUAUUCUGCcGGUGC | 0.2% |
| 8909 | 4461 | UCAGUUAUUCUGCUGGcGC | 0.1% |
| 4462 | 4462 | AUUCUGCUGGUGCACUUGC | 94.1% |
| 8910 | 4462 | AUUCUGCUGGUGCgCUUGC | 0.9% |
| 8911 | 4462 | AcUCUGCUGGUGCACUUGC | 1.0% |
| 8912 | 4462 | AUUCcGCUGGUGCACUUGC | 0.1% |
| 8913 | 4462 | AUUCgGCUGGUGCACUUGC | 0.1% |
| 8914 | 4462 | AUUCUGCcGGUGCACUUGC | 0.2% |
| 8915 | 4462 | AUUCUGCUGGcGCACUUGC | 0.1% |
| 4463 | 4463 | CUCAUGGAAUGGCUAAAGA | 94.1% |
| 8916 | 4463 | CUCAUGGAAUGGCUgAAGA | 0.1% |
| 8917 | 4463 | CUCAUGGAAUGGuUAAAGA | 0.1% |
| 8918 | 4463 | CUCAUGGAgUGGCUAAAGA | 5.4% |
| 8919 | 4463 | CUaAUGGAAUGGCUAAAGA | 0.1% |
| 8920 | 4463 | CUCAcGGAAUGGCUAAAGA | 0.2% |
| 4464 | 4464 | UCAUGGAAUGGCUAAAGAC | 94.1% |
| 8921 | 4464 | UCAUGGAAUGGCUgAAGAC | 0.1% |
| 8922 | 4464 | UCAUGGAAUGGuUAAAGAC | 0.1% |
| 8923 | 4464 | UCAUGGAgUGGCUAAAGAC | 5.4% |
| 8924 | 4464 | UaAUGGAAUGGCUAAAGAC | 0.1% |
| 8925 | 4464 | UCAcGGAAUGGCUAAAGAC | 0.2% |
| 4465 | 4465 | UAUUCUGCUGGUGCACUUG | 94.1% |
| 8926 | 4465 | UAUUCUGCUGGUGCgCUUG | 0.9% |
| 8927 | 4465 | UAcUCUGCUGGUGCACUUG | 1.0% |
| 8928 | 4465 | UAUUCcGCUGGUGCACUUG | 0.1% |
| 8929 | 4465 | UAUUCgGCUGGUGCACUUG | 0.1% |
| 8930 | 4465 | UAUUCUGCcGGUGCACUUG | 0.2% |
| 8931 | 4465 | UAUUCUGCUGGcGCACUUG | 0.1% |
| 4466 | 4466 | AUGGAAUGGCUAAAGACAA | 94.0% |
| 8932 | 4466 | AUGGAAUGGCUgAAGACAA | 0.1% |
| 8933 | 4466 | AUGGAAUGGuUAAAGACAA | 0.1% |
| 8934 | 4466 | AUGGAgUGGCUAAAGACAA | 5.4% |
| 8935 | 4466 | AcGGAAUGGCUAAAGACAA | 0.2% |
| 8936 | 4466 | AUGGAAUGGCUAAAGACuA | 0.2% |
| 4467 | 4467 | CUCAGUUAUUCUGCUGGUG | 94.0% |
| 8937 | 4467 | CUCgGUUAUUCUGCUGGUG | 0.1% |
| 8938 | 4467 | CUuAGUUAUUCUGCUGGUG | 0.5% |
| 8939 | 4467 | uUCAGUUAUUCUGCUGGUG | 0.2% |
| 8940 | 4467 | CUCAGcUAUUCUGCUGGUG | 0.2% |
| 8941 | 4467 | CUCAGUUAcUCUGCUGGUG | 1.0% |
| 8942 | 4467 | CUCAGUUAUUCcGCUGGUG | 0.1% |
| 8943 | 4467 | CUCAGUUAUUCgGCUGGUG | 0.1% |
| 8944 | 4467 | CUCAGUUAUUCUGCcGGUG | 0.2% |
| 8945 | 4467 | CUCAGUUAUUCUGCUGGcG | 0.1% |
| 4468 | 4468 | GUUAUUCUGCUGGUGCACU | 94.0% |
| 8946 | 4468 | GUUAUUCUGCUGGUGCgCU | 0.9% |
| 8947 | 4468 | GcUAUUCUGCUGGUGCACU | 0.2% |
| 8948 | 4468 | GUUAcUCUGCUGGUGCACU | 1.0% |
| 8949 | 4468 | GUUAUUCcGCUGGUGCACU | 0.1% |
| 8950 | 4468 | GUUAUUCgGCUGGUGCACU | 0.1% |
| 8951 | 4468 | GUUAUUCUGCcGGUGCACU | 0.2% |
| 8952 | 4468 | GUUAUUCUGCUGGcGCACU | 0.1% |
| 4469 | 4469 | UGGCCAGCACUACAGCUAA | 94.0% |
| 8953 | 4469 | UGGCCAGCACUACgGCUAA | 1.5% |
| 8954 | 4469 | UGGCCAGCAuUACAGCUAA | 0.1% |
| 8955 | 4469 | UGGCCAGuACUACAGCUAA | 0.1% |
| 8956 | 4469 | UGGCCAGuACUACgGCUAA | 0.3% |
| 8957 | 4469 | UaGCCAGCACUACAGCUAA | 1.2% |
| 8958 | 4469 | UGGCaAGCACUACAGCUAA | 0.1% |
| 8959 | 4469 | UGGCCAGCACcACAGCUAA | 0.3% |
| 8960 | 4469 | UGGCCAGCACUACAGCcAA | 0.3% |
| 8961 | 4469 | UGGCCAGCACUACAGCUuA | 0.1% |
| 8962 | 4469 | UGGCCAGCACUACcGCUAA | 0.1% |
| 8963 | 4469 | UaGCCAGCACUACgGCUAA | 1.2% |
| 8964 | 4469 | UGGCuAGCACcACAGCUAA | 0.1% |
| 8965 | 4469 | UaGCCAGCACaACAGCUAA | 0.4% |
| 8966 | 4469 | UaGCCAGCACUACAGCcAA | 0.1% |
| 8967 | 4469 | UaGCCAGCACcACgGCUAA | 0.1% |
| 4470 | 4470 | UUAUUCUGCUGGUGCACUU | 94.0% |
| 8968 | 4470 | UUAUUCUGCUGGUGCgCUU | 0.9% |
| 8969 | 4470 | cUAUUCUGCUGGUGCACUU | 0.2% |
| 8970 | 4470 | UUAcUCUGCUGGUGCACUU | 1.0% |
| 8971 | 4470 | UUAUUCcGCUGGUGCACUU | 0.1% |
| 8972 | 4470 | UUAUUCgGCUGGUGCACUU | 0.1% |
| 8973 | 4470 | UUAUUCUGCcGGUGCACUU | 0.2% |
| 8974 | 4470 | UUAUUCUGCUGGcGCACUU | 0.1% |
| 4471 | 4471 | CAUGGAAUGGCUAAAGACA | 94.0% |
| 8975 | 4471 | CAUGGAAUGGCUgAAGACA | 0.1% |
| 8976 | 4471 | CAUGGAAUGGuUAAAGACA | 0.1% |
| 8977 | 4471 | CAUGGAgUGGCUAAAGACA | 5.4% |
| 8978 | 4471 | aAUGGAAUGGCUAAAGACA | 0.1% |
| 8979 | 4471 | CAcGGAAUGGCUAAAGACA | 0.2% |
| 8980 | 4471 | CAUGGAAUGGCUAAAGACu | 0.2% |
| 4472 | 4472 | UGGAAUGGCUAAAGACAAG | 93.9% |
| 8981 | 4472 | UGGAAUGGCUgAAGACAAG | 0.1% |
| 8982 | 4472 | UGGAAUGGuUAAAGACAAG | 0.1% |
| 8983 | 4472 | UGGAgUGGCUAAAGACAAG | 5.4% |
| 8984 | 4472 | cGGAAUGGCUAAAGACAAG | 0.2% |
| 8985 | 4472 | UGGAAUGGCUAAAGACAAa | 0.2% |
| 8986 | 4472 | UGGAAUGGCUAAAGACuAG | 0.2% |
| 4473 | 4473 | UCUCAUGGAAUGGCUAAAG | 93.9% |
| 8987 | 4473 | UCUCAUGGAAUGGCUgAAG | 0.1% |
| 8988 | 4473 | UCUCAUGGAAUGGuUAAAG | 0.1% |
| 8989 | 4473 | UCUCAUGGAgUGGCUAAAG | 5.4% |
| 8990 | 4473 | aCUCAUGGAAUGGCUAAAG | 0.3% |
| 8991 | 4473 | UCUaAUGGAAUGGCUAAAG | 0.1% |
| 8992 | 4473 | UCUCAcGGAAUGGCUAAAG | 0.2% |
| 4474 | 4474 | AGUUAUUCUGCUGGUGCAC | 93.9% |
| 8993 | 4474 | AGUUAUUCUGCUGGUGCgC | 0.9% |
| 8994 | 4474 | gGUUAUUCUGCUGGUGCAC | 0.1% |
| 8995 | 4474 | AGcUAUUCUGCUGGUGCAC | 0.2% |
| 8996 | 4474 | AGUUAcUCUGCUGGUGCAC | 1.0% |
| 8997 | 4474 | AGUUAUUCcGCUGGUGCAC | 0.1% |
| 8998 | 4474 | AGUUAUUCgGCUGGUGCAC | 0.1% |
| 8999 | 4474 | AGUUAUUCUGCcGGUGCAC | 0.2% |
| 9000 | 4474 | AGUUAUUCUGCUGGcGCAC | 0.1% |
| 4475 | 4475 | GGA2UGGCUAAAGACAAGA | 93.7% |
| 9001 | 4475 | GGAAUGGCUAAAGACAAGg | 0.4% |
| 9002 | 4475 | GGAAUGGCUgAAGACAAGA | 0.1% |
| 9003 | 4475 | GGAAUGGuUAAAGACAAGA | 0.1% |
| 9004 | 4475 | GGAgUGGCUAAAGACAAGA | 5.4% |
| 9005 | 4475 | GGAAUGGCUAAAGACAAaA | 0.2% |
| 9006 | 4475 | GGAAUGGCUAAAGACuAGA | 0.2% |
| 4476 | 4476 | AAUGGCUAAAGACAAGACC | 93.7% |
| 9007 | 4476 | AAUGGCUAAAGACAAGgCC | 0.4% |
| 9008 | 4476 | AAUGGCUgAAGACAAGACC | 0.1% |
| 9009 | 4476 | AAUGGuUAAAGACAAGACC | 0.1% |
| 9010 | 4476 | AgUGGCUAAAGACAAGACC | 5.4% |
| 9011 | 4476 | AAUGGCUAAAGACAAaACC | 0.2% |
| 9012 | 4476 | AAUGGCUAAAGACuAGACC | 0.2% |
| 4477 | 4477 | GAAUGGCUAAAGACAAGAC | 93.7% |
| 9013 | 4477 | GAAUGGCUAAAGACAAGgC | 0.4% |
| 9014 | 4477 | GAAUGGCUgAAGACAAGAC | 0.1% |
| 9015 | 4477 | GAAUGGuUAAAGACAAGAC | 0.1% |
| 9016 | 4477 | GAgUGGCUAAAGACAAGAC | 5.4% |
| 9017 | 4477 | GAAUGGCUAAAGACAAaAC | 0.2% |
| 9018 | 4477 | GAAUGGCUAAAGACuAGAC | 0.2% |
| 4478 | 4478 | UCCAUGGGGCCAAAGAAAU | 93.4% |
| 9019 | 4478 | UCCAUGGGGCCAAAGAAgU | 0.4% |
| 9020 | 4478 | UCCAUGGGGCCAAAGAgAU | 0.1% |
| 9021 | 4478 | UCCAUGGGGCCAAAGgAAU | 0.2% |
| 9022 | 4478 | UCCAUGGGGCCAAgGAAAU | 0.1% |
| 9023 | 4478 | UCCAUGGGGCuAAAGAAAU | 0.9% |
| 9024 | 4478 | UCuAUGGGGCCAAAGAAAU | 0.2% |
| 9025 | 4478 | UuCAUGGGGCCAAAGAAAU | 0.5% |
| 9026 | 4478 | UCCAUGGGGCCAAgGAggU | 0.1% |
| 9027 | 4478 | UCCAUGGaGCCAAAGAAAU | 0.4% |
| 9028 | 4478 | UCCAcGGGGCCAAAGAAgU | 0.3% |
| 9029 | 4478 | UuCAUGGGGCCAAAGuAAU | 0.1% |
| 4479 | 4479 | GCGUAGACGCUUUGUCCAA | 93.4% |
| 9030 | 4479 | GCGUAGACGCUUUGUCCAg | 2.0% |
| 9031 | 4479 | GCGUAGACGCUUUGUuCAA | 0.1% |
| 9032 | 4479 | GCGUAGACGuUUUGUCCAA | 0.2% |
| 9033 | 4479 | aCGUAGACGCUUUGUCCAA | 1.5% |
| 9034 | 4479 | GCGUAcACGCUUUGUCCAA | 0.1% |
| 9035 | 4479 | GCGUAGACGaUUUGUCCAA | 1.5% |
| 9036 | 4479 | GCGUAGACGCUUcGUCCAA | 0.1% |
| 9037 | 4479 | GCGUAGACGgUUUGUCCAA | 0.3% |
| 9038 | 4479 | GCGUAuACGCUUUGUCCAA | 0.2% |
| 9039 | 4479 | aCGUAGACGCUUUGUuCAA | 0.2% |
| 9040 | 4479 | GCGUAaACGCUUUGUCCAg | 0.1% |
| 9041 | 4479 | aCGUAuACGCUUUGUCCAA | 0.1% |
| 9042 | 4479 | GCGUAuACGaUUUGUCCAA | 0.1% |
| 4480 | 4480 | CAGUUAUUCUGCUGGUGCA | 93.4% |
| 9043 | 4480 | CAGUUAUUCUGCUGGUGCg | 0.9% |
| 9044 | 4480 | CgGUUAUUCUGCUGGUGCA | 0.1% |
| 9045 | 4480 | uAGUUAUUCUGCUGGUGCA | 0.5% |
| 9046 | 4480 | CAGcUAUUCUGCUGGUGCA | 0.2% |
| 9047 | 4480 | CAGUUAcUCUGCUGGUGCA | 1.0% |
| 9048 | 4480 | CAGUUAUUCcGCUGGUGCA | 0.1% |
| 9049 | 4480 | CAGUUAUUCgGCUGGUGCA | 0.1% |
| 9050 | 4480 | CAGUUAUUCUGCcGGUGCA | 0.2% |
| 9051 | 4480 | CAGUUAUUCUGCUGGcGCA | 0.1% |
| 4481 | 4481 | UUCCAUGGGGCCAAAGAAA | 93.4% |
| 9052 | 4481 | UUCCAUGGGGCCAAAGAAg | 0.4% |
| 9053 | 4481 | UUCCAUGGGGCCAAAGAgA | 0.1% |
| 9054 | 4481 | UUCCAUGGGGCCAAAGgAA | 0.2% |
| 9055 | 4481 | UUCCAUGGGGCCAAgGAAA | 0.1% |
| 9056 | 4481 | UUCCAUGGGGCuAAAGAAA | 0.9% |
| 9057 | 4481 | UUCuAUGGGGCCAAAGAAA | 0.2% |
| 9058 | 4481 | UUuCAUGGGGCCAAAGAAA | 0.5% |
| 9059 | 4481 | UUCCAUGGGGCCAAgGAgg | 0.1% |
| 9060 | 4481 | UUCCAUGGaGCCAAAGAAA | 0.4% |
| 9061 | 4481 | UUCCAcGGGGCCAAAGAAg | 0.3% |
| 9062 | 4481 | UUuCAUGGGGCCAAAGuAA | 0.1% |
| 4482 | 4482 | CACCUCUGACUAAGGGGAU | 93.2% |
| 9063 | 4482 | CACCUCUGACUAgGGGGAU | 0.1% |
| 9064 | 4482 | CACCUCUaACUAAGGGGAU | 0.9% |
| 9065 | 4482 | CACCUCUGACaAAGGGGAU | 0.4% |
| 9066 | 4482 | CACCUCUGACcAAGGGGAU | 0.2% |
| 9067 | 4482 | CACCUCUGACUAAaGGGAU | 2.0% |
| 9068 | 4482 | CACCUCUGACUAAGGGaAU | 3.0% |
| 9069 | 4482 | CACCUCUGACUAAGGGuAU | 0.1% |
| 9070 | 4482 | CACCUCUuACUAAGGGGAU | 0.1% |
| 9071 | 4482 | CACCUCUGACcAAGGGaAU | 0.1% |
| 4483 | 4483 | GUCACCUCUGACUAAGGGG | 93.2% |
| 9072 | 4483 | GUCACCUCUGACUAgGGGG | 0.1% |
| 9073 | 4483 | GUCACCUCUaACUAAGGGG | 0.9% |
| 9074 | 4483 | GUCACCUCUGACaAAGGGG | 0.4% |
| 9075 | 4483 | GUCACCUCUGACcAAGGGG | 0.2% |
| 9076 | 4483 | GUCACCUCUGACUAAaGGG | 2.0% |
| 9077 | 4483 | GUCACCUCUGACUAAGGGa | 3.0% |
| 9078 | 4483 | GUCACCUCUGACUAAGGGu | 0.1% |
| 9079 | 4483 | GUCACCUCUuACUAAGGGG | 0.1% |
| 9080 | 4483 | GUCACCUCUGACcAAGGGa | 0.1% |
| 4484 | 4484 | UCACCUCUGACUAAGGGGA | 93.2% |
| 9081 | 4484 | UCACCUCUGACUAgGGGGA | 0.1% |
| 9082 | 4484 | UCACCUCUaACUAAGGGGA | 0.9% |
| 9083 | 4484 | UCACCUCUGACaAAGGGGA | 0.4% |
| 9084 | 4484 | UCACCUCUGACcAAGGGGA | 0.2% |
| 9085 | 4484 | UCACCUCUGACUAAaGGGA | 2.0% |
| 9086 | 4484 | UCACCUCUGACUAAGGGaA | 3.0% |
| 9087 | 4484 | UCACCUCUGACUAAGGGuA | 0.1% |
| 9088 | 4484 | UCACCUCUuACUAAGGGGA | 0.1% |
| 9089 | 4484 | UCACCUCUGACcAAGGGaA | 0.1% |
| 4485 | 4485 | CUGGUGCACUUGCCAGUUG | 93.0% |
| 9090 | 4485 | CUGGUGCACUUGCuAGUUG | 2.4% |
| 9091 | 4485 | CUGGUGCgCUUGCCAGUUG | 2.5% |
| 9092 | 4485 | CcGGUGCACUUGCCAGUUG | 1.7% |
| 9093 | 4485 | CUGGcGCACUUGCCAGUUG | 0.1% |
| 9094 | 4485 | CUGGUGCgCUUGCCAGcUG | 0.2% |
| 9095 | 4485 | CcGGgGCACUUGCCAGUUG | 0.1% |
| 4486 | 4486 | GAGGCUCUCAUGGAAUGGC | 93.0% |
| 9096 | 4486 | GAGGCUCUCAUGGAAUGGu | 0.1% |
| 9097 | 4486 | GAGGCUCUCAUGGAgUGGC | 5.4% |
| 9098 | 4486 | GAGGuUCUCAUGGAAUGGC | 0.9% |
| 9099 | 4486 | GAaGCUCUCAUGGAAUGGC | 0.1% |
| 9100 | 4486 | GAGGCaCUCAUGGAAUGGC | 0.3% |
| 9101 | 4486 | GAGGCUCUaAUGGAAUGGC | 0.1% |
| 9102 | 4486 | GAGGCUCUCAcGGAAUGGC | 0.1% |
| 9103 | 4486 | GAGGuUCUCAcGGAAUGGC | 0.1% |
| 4487 | 4487 | GCUCUCAUGGAAUGGCUAA | 93.0% |
| 9104 | 4487 | GCUCUCAUGGAAUGGCUgA | 0.1% |
| 9105 | 4487 | GCUCUCAUGGAAUGGuUAA | 0.1% |
| 9106 | 4487 | GCUCUCAUGGAgUGGCUAA | 5.4% |
| 9107 | 4487 | GuUCUCAUGGAAUGGCUAA | 0.9% |
| 9108 | 4487 | GCaCUCAUGGAAUGGCUAA | 0.3% |
| 9109 | 4487 | GCUCUaAUGGAAUGGCUAA | 0.1% |
| 9110 | 4487 | GCUCUCAcGGAAUGGCUAA | 0.1% |
| 9111 | 4487 | GuUCUCAcGGAAUGGCUAA | 0.1% |
| 4488 | 4488 | CUCUCAUGGAAUGGCUAAA | 93.0% |
| 9112 | 4488 | CUCUCAUGGAAUGGCUgAA | 0.1% |
| 9113 | 4488 | CUCUCAUGGAAUGGuUAAA | 0.1% |
| 9114 | 4488 | CUCUCAUGGAgUGGCUAAA | 5.4% |
| 9115 | 4488 | uUCUCAUGGAAUGGCUAAA | 0.9% |
| 9116 | 4488 | CaCUCAUGGAAUGGCUAAA | 0.3% |
| 9117 | 4488 | CUCUaAUGGAAUGGCUAAA | 0.1% |
| 9118 | 4488 | CUCUCAcGGAAUGGCUAAA | 0.1% |
| 9119 | 4488 | uUCUCAcGGAAUGGCUAAA | 0.1% |
| 4489 | 4489 | AUGGGGCCAAAGAAAUAGC | 93.0% |
| 9120 | 4489 | AUGGGGCCAAAGAAgUAGC | 0.4% |
| 9121 | 4489 | AUGGGGCCAAAGAgAUAGC | 0.1% |
| 9122 | 4489 | AUGGGGCCAAAGgAAUAGC | 0.2% |
| 9123 | 4489 | AUGGGGCCAAgGAAAUAGC | 0.1% |
| 9124 | 4489 | AUGGGGCuAAAGAAAUAGC | 0.9% |
| 9125 | 4489 | AUGGaGCCAAAGAAAUAGC | 0.4% |
| 9126 | 4489 | AUGGGGCCAAAGAAAUAuC | 0.2% |
| 9127 | 4489 | AUGGGGCCAAAGAAAUcGC | 0.5% |
| 9128 | 4489 | AUGGGGCCAAAGuAAUAGC | 0.1% |
| 9129 | 4489 | AcGGGGCCAAAGAAgUAGC | 0.3% |
| 9130 | 4489 | AUGGGGCCAAAGAAAUcuC | 0.4% |
| 4490 | 4490 | AGGCUCUCAUGGAAUGGCU | 93.0% |
| 9131 | 4490 | AGGCUCUCAUGGAAUGGuU | 0.1% |
| 9132 | 4490 | AGGCUCUCAUGGAgUGGCU | 5.4% |
| 9133 | 4490 | AGGuUCUCAUGGAAUGGCU | 0.9% |
| 9134 | 4490 | AaGCUCUCAUGGAAUGGCU | 0.1% |
| 9135 | 4490 | AGGCaCUCAUGGAAUGGCU | 0.3% |
| 9136 | 4490 | AGGCUCUaAUGGAAUGGCU | 0.1% |
| 9137 | 4490 | AGGCUCUCAcGGAAUGGCU | 0.1% |
| 9138 | 4490 | AGGuUCUCAcGGAAUGGCU | 0.1% |
| 4491 | 4491 | GGCUCUCAUGGAAUGGCUA | 92.9% |
| 9139 | 4491 | GGCUCUCAUGGAAUGGCUg | 0.1% |
| 9140 | 4491 | GGCUCUCAUGGAAUGGuUA | 0.1% |
| 9141 | 4491 | GGCUCUCAUGGAgUGGCUA | 5.4% |
| 9142 | 4491 | GGuUCUCAUGGAAUGGCUA | 0.9% |
| 9143 | 4491 | aGCUCUCAUGGAAUGGCUA | 0.1% |
| 9144 | 4491 | GGCaCUCAUGGAAUGGCUA | 0.3% |
| 9145 | 4491 | GGCUCUaAUGGAAUGGCUA | 0.1% |
| 9146 | 4491 | GGCUCUCAcGGAAUGGCUA | 0.1% |
| 9147 | 4491 | GGuUCUCAcGGAAUGGCUA | 0.1% |
| 4492 | 4492 | UUGAGGCUCUCAUGGAAUG | 92.9% |
| 9148 | 4492 | UUGAGGCUCUCAUGGAgUG | 3.8% |
| 9149 | 4492 | UUGAGGuUCUCAUGGAAUG | 0.9% |
| 9150 | 4492 | UaGAGGCUCUCAUGGAAUG | 0.1% |
| 9151 | 4492 | UcGAGGCUCUCAUGGAAUG | 0.1% |
| 9152 | 4492 | UUGAaGCUCUCAUGGAAUG | 0.1% |
| 9153 | 4492 | UUGAGGCaCUCAUGGAAUG | 0.3% |
| 9154 | 4492 | UUGAGGCUCUaAUGGAAUG | 0.1% |
| 9155 | 4492 | UUGAGGCUCUCAcGGAAUG | 0.1% |
| 9156 | 4492 | UcGAGGCUCUCAUGGAgUG | 1.5% |
| 9157 | 4492 | UUGAGGuUCUCAcGGAAUG | 0.1% |
| 4493 | 4493 | UGAGGCUCUCAUGGAAUGG | 92.9% |
| 9158 | 4493 | UGAGGCUCUCAUGGAgUGG | 3.8% |
| 9159 | 4493 | UGAGGuUCUCAUGGAAUGG | 0.9% |
| 9160 | 4493 | aGAGGCUCUCAUGGAAUGG | 0.1% |
| 9161 | 4493 | cGAGGCUCUCAUGGAAUGG | 0.1% |
| 9162 | 4493 | UGAaGCUCUCAUGGAAUGG | 0.1% |
| 9163 | 4493 | UGAGGCaCUCAUGGAAUGG | 0.3% |
| 9164 | 4493 | UGAGGCUCUaAUGGAAUGG | 0.1% |
| 9165 | 4493 | UGAGGCUCUCAcGGAAUGG | 0.1% |
| 9166 | 4493 | cGAGGCUCUCAUGGAgUGG | 1.5% |
| 9167 | 4493 | UGAGGuUCUCAcGGAAUGG | 0.1% |
| 4494 | 4494 | CUUGAGGCUCUCAUGGAAU | 92.9% |
| 9168 | 4494 | CUUGAGGCUCUCAUGGAgU | 3.8% |
| 9169 | 4494 | CUUGAGGuUCUCAUGGAAU | 0.9% |
| 9170 | 4494 | CUaGAGGCUCUCAUGGAAU | 0.1% |
| 9171 | 4494 | CUcGAGGCUCUCAUGGAAU | 0.1% |
| 9172 | 4494 | CUUGAaGCUCUCAUGGAAU | 0.1% |
| 9173 | 4494 | CUUGAGGCaCUCAUGGAAU | 0.3% |
| 9174 | 4494 | CUUGAGGCUCUaAUGGAAU | 0.1% |
| 9175 | 4494 | CUUGAGGCUCUCAcGGAAU | 0.1% |
| 9176 | 4494 | CUcGAGGCUCUCAUGGAgU | 1.5% |
| 9177 | 4494 | CUUGAGGuUCUCAcGGAAU | 0.1% |
| 4495 | 4495 | CAUGGGGCCAAAGAAAUAG | 92.9% |
| 9178 | 4495 | CAUGGGGCCAAAGAAgUAG | 0.4% |
| 9179 | 4495 | CAUGGGGCCAAAGAgAUAG | 0.1% |
| 9180 | 4495 | CAUGGGGCCAAAGgAAUAG | 0.2% |
| 9181 | 4495 | CAUGGGGCCAAgGAAAUAG | 0.1% |
| 9182 | 4495 | CAUGGGGCuAAAGAAAUAG | 0.9% |
| 9183 | 4495 | uAUGGGGCCAAAGAAAUAG | 0.1% |
| 9184 | 4495 | CAUGGaGCCAAAGAAAUAG | 0.4% |
| 9185 | 4495 | CAUGGGGCCAAAGAAAUAu | 0.2% |
| 9186 | 4495 | CAUGGGGCCAAAGAAAUcG | 0.4% |
| 9187 | 4495 | CAUGGGGCCAAAGuAAUAG | 0.1% |
| 9188 | 4495 | CAcGGGGCCAAAGAAgUAG | 0.3% |
| 9189 | 4495 | uAUGGGGCCAAAGAAAUcG | 0.1% |
| 9190 | 4495 | CAUGGGGCCAAAGAAAUcu | 0.4% |
| 4496 | 4496 | GCUGGUGCACUUGCCAGUU | 92.9% |
| 9191 | 4496 | GCUGGUGCACUUGCuAGUU | 2.4% |
| 9192 | 4496 | GCUGGUGCgCUUGCCAGUU | 0.7% |
| 9193 | 4496 | aCUGGUGCACUUGCCAGUU | 0.1% |
| 9194 | 4496 | GCcGGUGCACUUGCCAGUU | 0.2% |
| 9195 | 4496 | GCUGGcGCACUUGCCAGUU | 0.1% |
| 9196 | 4496 | aCUGGUGCgCUUGCCAGUU | 1.8% |
| 9197 | 4496 | GCUGGUGCgCUUGCCAGcU | 0.2% |
| 9198 | 4496 | aCcGGUGCACUUGCCAGUU | 1.5% |
| 4497 | 4497 | CUUCUACGGAAGGAGUACC | 92.8% |
| 9199 | 4497 | CUUCUACGGAAGGAGUgCC | 3.4% |
| 9200 | 4497 | CUUCUACGGAAGGgGUACC | 0.2% |
| 9201 | 4497 | CUUCUACGGAgGGAGUACC | 0.1% |
| 9202 | 4497 | CUUCUACGGgAGGAGUACC | 0.2% |
| 9203 | 4497 | CUUuUACGGAAGGAGUACC | 0.1% |
| 9204 | 4497 | aUUCUACGGAAGGAGUACC | 0.1% |
| 9205 | 4497 | CUgCUACGGAAGGAGUACC | 0.1% |
| 9206 | 4497 | CUUCcACGGAAGGAGUACC | 0.1% |
| 9207 | 4497 | CUUCUACaGAAGGAGUACC | 0.1% |
| 9208 | 4497 | CUUCUACGGAAGGAaUACC | 0.4% |
| 9209 | 4497 | CUUCUACGGAAGGAGUuCC | 0.1% |
| 9210 | 4497 | CUUgUACGGAAGGAGUACC | 0.1% |
| 9211 | 4497 | CUcCUACGGAAGGAGUgCu | 0.5% |
| 9212 | 4497 | CUUCUACaGAuGGAGUACC | 0.2% |
| 9213 | 4497 | CUgCUACGGcAGGgGUACC | 1.2% |
| 4498 | 4498 | UCUUGAGGCUCUCAUGGAA | 92.7% |
| 9214 | 4498 | UCUUGAGGCUCUCAUGGAg | 3.7% |
| 9215 | 4498 | UCUUGAGGuUCUCAUGGAA | 0.9% |
| 9216 | 4498 | cCUUGAGGCUCUCAUGGAA | 0.2% |
| 9217 | 4498 | UCUaGAGGCUCUCAUGGAA | 0.1% |
| 9218 | 4498 | UCUcGAGGCUCUCAUGGAA | 0.1% |
| 9219 | 4498 | UCUUGAaGCUCUCAUGGAA | 0.1% |
| 9220 | 4498 | UCUUGAGGCaCUCAUGGAA | 0.3% |
| 9221 | 4498 | UCUUGAGGCUCUaAUGGAA | 0.1% |
| 9222 | 4498 | UCUUGAGGCUCUCAcGGAA | 0.1% |
| 9223 | 4498 | cCUUGAGGCUCUCAUGGAg | 0.1% |
| 9224 | 4498 | UCUcGAGGCUCUCAUGGAg | 1.5% |
| 9225 | 4498 | UCUUGAGGuUCUCAcGGAA | 0.1% |
| 4499 | 4499 | CUGCUGGUGCACUUGCCAG | 92.7% |
| 9226 | 4499 | CUGCUGGUGCACUUGCuAG | 2.4% |
| 9227 | 4499 | CUGCUGGUGCgCUUGCCAG | 0.9% |
| 9228 | 4499 | CcGCUGGUGCACUUGCCAG | 0.1% |
| 9229 | 4499 | CgGCUGGUGCACUUGCCAG | 0.1% |
| 9230 | 4499 | CUGCcGGUGCACUUGCCAG | 0.2% |
| 9231 | 4499 | CUGCUGGcGCACUUGCCAG | 0.1% |
| 9232 | 4499 | CaaCUGGUGCACUUGCCAG | 0.1% |
| 9233 | 4499 | CaaCUGGUGCgCUUGCCAG | 1.8% |
| 4500 | 4500 | UGCUGGUGCACUUGCCAGU | 92.7% |
| 9234 | 4500 | UGCUGGUGCACUUGCuAGU | 2.4% |
| 9235 | 4500 | UGCUGGUGCgCUUGCCAGU | 0.7% |
| 9236 | 4500 | cGCUGGUGCACUUGCCAGU | 0.1% |
| 9237 | 4500 | gGCUGGUGCACUUGCCAGU | 0.1% |
| 9238 | 4500 | UGCcGGUGCACUUGCCAGU | 0.2% |
| 9239 | 4500 | UGCUGGcGCACUUGCCAGU | 0.1% |
| 9240 | 4500 | UGCUGGUGCgCUUGCCAGc | 0.2% |
| 9241 | 4500 | aaCUGGUGCACUUGCCAGU | 0.1% |
| 9242 | 4500 | aaCUGGUGCgCUUGCCAGU | 1.8% |
| 4501 | 4501 | UCUGCUGGUGCACUUGCCA | 92.7% |
| 9243 | 4501 | UCUGCUGGUGCACUUGCuA | 2.4% |
| 9244 | 4501 | UCUGCUGGUGCgCUUGCCA | 0.9% |
| 9245 | 4501 | UCcGCUGGUGCACUUGCCA | 0.1% |
| 9246 | 4501 | UCgGCUGGUGCACUUGCCA | 0.1% |
| 9247 | 4501 | UCUGCcGGUGCACUUGCCA | 0.2% |
| 9248 | 4501 | UCUGCUGGcGCACUUGCCA | 0.1% |
| 9249 | 4501 | UCaaCUGGUGCACUUGCCA | 0.1% |
| 9250 | 4501 | UCaaCUGGUGCgCUUGCCA | 1.8% |
| 4502 | 4502 | CCAUGGGGCCAAAGAAAUA | 92.6% |
| 9251 | 4502 | CCAUGGGGCCAAAGAAgUA | 0.4% |
| 9252 | 4502 | CCAUGGGGCCAAAGAgAUA | 0.1% |
| 9253 | 4502 | CCAUGGGGCCAAAGgAAUA | 0.2% |
| 9254 | 4502 | CCAUGGGGCCAAgGAAAUA | 0.1% |
| 9255 | 4502 | CCAUGGGGCuAAAGAAAUA | 0.9% |
| 9256 | 4502 | CuAUGGGGCCAAAGAAAUA | 0.1% |
| 9257 | 4502 | uCAUGGGGCCAAAGAAAUA | 0.5% |
| 9258 | 4502 | CCAUGGaGCCAAAGAAAUA | 0.4% |
| 9259 | 4502 | CCAUGGGGCCAAAGAAAUc | 0.8% |
| 9260 | 4502 | CCAcGGGGCCAAAGAAgUA | 0.3% |
| 9261 | 4502 | CuAUGGGGCCAAAGAAAUc | 0.1% |
| 9262 | 4502 | uCAUGGGGCCAAAGuAAUA | 0.1% |
| 4503 | 4503 | AGUCUAUGAGGGAAGAAUA | 92.6% |
| 9263 | 4503 | AGUCUAUGAGGGAAGAgUA | 4.7% |
| 9264 | 4503 | AGUCUAUGAGGGAgGAAUA | 0.8% |
| 9265 | 4503 | AGUCUAUGgGGGAAGAAUA | 0.1% |
| 9266 | 4503 | AGUuUAUGAGGGAAGAAUA | 0.1% |
| 9267 | 4503 | AGUCcAUGAGGGAAGAAUA | 0.9% |
| 9268 | 4503 | AGUCUAUGAGGGAAcAAUA | 0.1% |
| 9269 | 4503 | AGUCUuUGAGGGAAGAAUA | 0.6% |
| 9270 | 4503 | AGUCcAUGAGGGAAGAgUA | 0.1% |
| 9271 | 4503 | AGUCUAcuAGGGAAGAAUA | 0.1% |
| 4504 | 4504 | CCUUCUACGGAAGGAGUAC | 92.5% |
| 9272 | 4504 | CCUUCUACGGAAGGAGUgC | 3.4% |
| 9273 | 4504 | CCUUCUACGGAAGGgGUAC | 0.2% |
| 9274 | 4504 | CCUUCUACGGAgGGAGUAC | 0.1% |
| 9275 | 4504 | CCUUCUACGGgAGGAGUAC | 0.2% |
| 9276 | 4504 | CCUUuUACGGAAGGAGUAC | 0.1% |
| 9277 | 4504 | uCUUCUACGGAAGGAGUAC | 0.1% |
| 9278 | 4504 | CaUUCUACGGAAGGAGUAC | 0.1% |
| 9279 | 4504 | CCUgCUACGGAAGGAGUAC | 0.1% |
| 9280 | 4504 | CCUUCcACGGAAGGAGUAC | 0.1% |
| 9281 | 4504 | CCUUCUACaGAAGGAGUAC | 0.1% |
| 9282 | 4504 | CCUUCUACGGAAGGAaUAC | 0.4% |
| 9283 | 4504 | CCUUCUACGGAAGGAGUuC | 0.1% |
| 9284 | 4504 | CCUUgUACGGAAGGAGUAC | 0.1% |
| 9285 | 4504 | gCUUCUACGGAAGGAGUAC | 0.2% |
| 9286 | 4504 | CCUcCUACGGAAGGAGUgC | 0.5% |
| 9287 | 4504 | CCUUCUACaGAuGGAGUAC | 0.2% |
| 9288 | 4504 | CCUgCUACGGcAGGgGUAC | 1.2% |
| 4505 | 4505 | GUCUAUGAGGGAAGAAUAU | 92.4% |
| 9289 | 4505 | GUCUAUGAGGGAAGAgUAU | 3.4% |
| 9290 | 4505 | GUCUAUGAGGGAgGAAUAU | 0.8% |
| 9291 | 4505 | GUCUAUGgGGGAAGAAUAU | 0.1% |
| 9292 | 4505 | GUuUAUGAGGGAAGAAUAU | 0.1% |
| 9293 | 4505 | GUCcAUGAGGGAAGAAUAU | 0.9% |
| 9294 | 4505 | GUCUAUGAGGGAAcAAUAU | 0.1% |
| 9295 | 4505 | GUCUAUGAGGGAAGAAUAc | 0.2% |
| 9296 | 4505 | GUCUuUGAGGGAAGAAUAU | 0.6% |
| 9297 | 4505 | GUCcAUGAGGGAAGAgUAU | 0.1% |
| 9298 | 4505 | GUCUAUGAGGGAAGAgUAc | 1.3% |
| 9299 | 4505 | GUCUAcuAGGGAAGAAUAU | 0.1% |
| 4506 | 4506 | CUAUGAGGGAAGAAUAUCG | 92.4% |
| 9300 | 4506 | CUAUGAGGGAAGAgUAUCG | 3.4% |
| 9301 | 4506 | CUAUGAGGGAgGAAUAUCG | 0.8% |
| 9302 | 4506 | CUAUGgGGGAAGAAUAUCG | 0.1% |
| 9303 | 4506 | CcAUGAGGGAAGAAUAUCG | 0.8% |
| 9304 | 4506 | CUAUGAGGGAAGAAUAcCG | 0.2% |
| 9305 | 4506 | CUuUGAGGGAAGAAUAUCG | 0.6% |
| 9306 | 4506 | CUAUGAGGGAAcAAUAUuG | 0.1% |
| 9307 | 4506 | CUAUGAGGGAAGAgUAcCG | 1.3% |
| 9308 | 4506 | uUAUGAGGGAAGAAUAUgG | 0.1% |
| 9309 | 4506 | CcAUGAGGGAAGAAUAUCa | 0.1% |
| 9310 | 4506 | CUAcuAGGGAAGAAUAUCG | 0.1% |
| 9311 | 4506 | CcAUGAGGGAAGAgUAUCa | 0.1% |
| 4507 | 4507 | UCUAUGAGGGAAGAAUAUC | 92.4% |
| 9312 | 4507 | UCUAUGAGGGAAGAgUAUC | 3.4% |
| 9313 | 4507 | UCUAUGAGGGAgGAAUAUC | 0.8% |
| 9314 | 4507 | UCUAUGgGGGAAGAAUAUC | 0.1% |
| 9315 | 4507 | UCcAUGAGGGAAGAAUAUC | 0.9% |
| 9316 | 4507 | UCUAUGAGGGAAGAAUAcC | 0.2% |
| 9317 | 4507 | UCUuUGAGGGAAGAAUAUC | 0.6% |
| 9318 | 4507 | UCcAUGAGGGAAGAgUAUC | 0.1% |
| 9319 | 4507 | UCUAUGAGGGAAcAAUAUu | 0.1% |
| 9320 | 4507 | UCUAUGAGGGAAGAgUAcC | 1.3% |
| 9321 | 4507 | UuUAUGAGGGAAGAAUAUg | 0.1% |
| 9322 | 4507 | UCUAcuAGGGAAGAAUAUC | 0.1% |
| 4508 | 4508 | GUCAUUUUGUCAGCAUAGA | 92.2% |
| 9323 | 4508 | GUCAUUUUGUCAGCAUAGg | 0.2% |
| 9324 | 4508 | GUCAUUUUGUCAGCAUgGA | 0.1% |
| 9325 | 4508 | GUCAUUUUGUCAGuAUAGA | 0.2% |
| 9326 | 4508 | GUCgUUUUGUCAGCAUAGA | 0.1% |
| 9327 | 4508 | GUCAaUUUGUCAGCAUAGA | 0.1% |
| 9328 | 4508 | GUCAUUcUGUCAGCAUAGA | 0.1% |
| 9329 | 4508 | GUCAUUUUGcCAGCAUAGA | 0.1% |
| 9330 | 4508 | GUCAUUUUGUCAaCAUAGA | 5.1% |
| 9331 | 4508 | GUCAUUUUGUCAGCAUAaA | 0.3% |
| 9332 | 4508 | GUCAUUUUGUCAGCAUAcA | 0.1% |
| 9333 | 4508 | GUCgUUUUGUCAaCAUAGA | 0.1% |
| 9334 | 4508 | GUCAUUUcGUCAaCAUAGA | 0.1% |
| 9335 | 4508 | GUCAUUUUGUCAaCAUAGu | 0.4% |
| 9336 | 4508 | GUCAUUUUGUCAuCAUAcA | 0.1% |
| 4509 | 4509 | GAGUCUAUGAGGGAAGAAU | 92.2% |
| 9337 | 4509 | GAGUCUAUGAGGGAAGAgU | 4.7% |
| 9338 | 4509 | GAGUCUAUGAGGGAgGAAU | 0.8% |
| 9339 | 4509 | GAGUCUAUGgGGGAAGAAU | 0.1% |
| 9340 | 4509 | GAGUuUAUGAGGGAAGAAU | 0.1% |
| 9341 | 4509 | aAGUCUAUGAGGGAAGAAU | 0.4% |
| 9342 | 4509 | GAGUCcAUGAGGGAAGAAU | 0.9% |
| 9343 | 4509 | GAGUCUAUGAGGGAAcAAU | 0.1% |
| 9344 | 4509 | GAGUCUuUGAGGGAAGAAU | 0.6% |
| 9345 | 4509 | GAGUCcAUGAGGGAAGAgU | 0.1% |
| 9346 | 4509 | GAGUCUAcuAGGGAAGAAU | 0.1% |
| 4510 | 4510 | UCAUUUUGUCAGCAUAGAG | 92.1% |
| 9347 | 4510 | UCAUUUUGUCAGCAUAGgG | 0.2% |
| 9348 | 4510 | UCAUUUUGUCAGCAUgGAG | 0.1% |
| 9349 | 4510 | UCAUUUUGUCAGuAUAGAG | 0.2% |
| 9350 | 4510 | UCgUUUUGUCAGCAUAGAG | 0.1% |
| 9351 | 4510 | UCAaUUUGUCAGCAUAGAG | 0.1% |
| 9352 | 4510 | UCAUUcUGUCAGCAUAGAG | 0.1% |
| 9353 | 4510 | UCAUUUUGcCAGCAUAGAG | 0.1% |
| 9354 | 4510 | UCAUUUUGUCAaCAUAGAG | 3.7% |
| 9355 | 4510 | UCAUUUUGUCAGCAUAaAG | 0.3% |
| 9356 | 4510 | UCAUUUUGUCAGCAUAcAG | 0.1% |
| 9357 | 4510 | UCAUUUUGUCAGCAUAGAu | 0.1% |
| 9358 | 4510 | gCAUUUUGUCAaCAUAGAG | 0.1% |
| 9359 | 4510 | UCAUUUcGUCAaCAUAGAG | 0.1% |
| 9360 | 4510 | UCAUUUUGUCAaCAUAGAa | 1.3% |
| 9361 | 4510 | UCAUUUUGUCAaCAUAGuG | 0.4% |
| 9362 | 4510 | UCgUUUUGUCAaCAUAGAa | 0.1% |
| 4511 | 4511 | AGACUUGAAGAUGUCUUUG | 91.9% |
| 9363 | 4511 | AGACUUGAAGAUGUuUUUG | 0.8% |
| 9364 | 4511 | AGACUUGAgGAUGUCUUUG | 0.4% |
| 9365 | 4511 | AGgCUUGAAGAUGUCUUUG | 0.2% |
| 9366 | 4511 | AGACUUGAgGAUGUuUUUG | 1.7% |
| 9367 | 4511 | AaACUUGAAGAUGUCUUUG | 1.5% |
| 9368 | 4511 | AGACUUcAAGAUGUCUUUG | 0.1% |
| 9369 | 4511 | AGACUUGAAaAUGUCUUUG | 0.3% |
| 9370 | 4511 | AGACUUGAAGAUGUaUUUG | 2.5% |
| 9371 | 4511 | AGACUUGAAuAUGUCUUUG | 0.1% |
| 9372 | 4511 | AaACUUGAgGAUGUCUUUG | 0.1% |
| 9373 | 4511 | AGACUgGAAGgUGUCUUUG | 0.1% |
| 9374 | 4511 | AGACaaGAAGAUGUCUUUG | 0.2% |
| 9375 | 4511 | AGACUcGAAGAcGUuUUUG | 0.1% |
| 4512 | 4512 | GACUUGAAGAUGUCUUUGC | 91.9% |
| 9376 | 4512 | GACUUGAAGAUGUuUUUGC | 0.8% |
| 9377 | 4512 | GACUUGAgGAUGUCUUUGC | 0.4% |
| 9378 | 4512 | GgCUUGAAGAUGUCUUUGC | 0.2% |
| 9379 | 4512 | GACUUGAgGAUGUuUUUGC | 1.7% |
| 9380 | 4512 | aACUUGAAGAUGUCUUUGC | 1.5% |
| 9381 | 4512 | GACUUcAAGAUGUCUUUGC | 0.1% |
| 9382 | 4512 | GACUUGAAaAUGUCUUUGC | 0.3% |
| 9383 | 4512 | GACUUGAAGAUGUaUUUGC | 2.5% |
| 9384 | 4512 | GACUUGAAuAUGUCUUUGC | 0.1% |
| 9385 | 4512 | aACUUGAgGAUGUCUUUGC | 0.1% |
| 9386 | 4512 | GACUgGAAGgUGUCUUUGC | 0.1% |
| 9387 | 4512 | GACaaGAAGAUGUCUUUGC | 0.2% |
| 9388 | 4512 | GACUcGAAGAcGUuUUUGC | 0.1% |
| 4513 | 4513 | AGAGACUUGAAGAUGUCUU | 91.9% |
| 9389 | 4513 | AGAGACUUGAAGAUGUuUU | 0.8% |
| 9390 | 4513 | AGAGACUUGAgGAUGUCUU | 0.4% |
| 9391 | 4513 | AGAGgCUUGAAGAUGUCUU | 0.2% |
| 9392 | 4513 | AGAGACUUGAgGAUGUuUU | 1.7% |
| 9393 | 4513 | AGAaACUUGAAGAUGUCUU | 1.5% |
| 9394 | 4513 | AGAGACUUcAAGAUGUCUU | 0.1% |
| 9395 | 4513 | AGAGACUUGAAaAUGUCUU | 0.3% |
| 9396 | 4513 | AGAGACUUGAAGAUGUaUU | 2.5% |
| 9397 | 4513 | AGAGACUUGAAuAUGUCUU | 0.1% |
| 9398 | 4513 | AGAaACUUGAgGAUGUCUU | 0.1% |
| 9399 | 4513 | AGAGACUgGAAGgUGUCUU | 0.1% |
| 9400 | 4513 | AGAGACaaGAAGAUGUCUU | 0.2% |
| 9401 | 4513 | AGAGACUcGAAGAcGUuUU | 0.1% |
| 4514 | 4514 | GAGACUUGAAGAUGUCUUU | 91.9% |
| 9402 | 4514 | GAGACUUGAAGAUGUuUUU | 0.8% |
| 9403 | 4514 | GAGACUUGAgGAUGUCUUU | 0.4% |
| 9404 | 4514 | GAGgCUUGAAGAUGUCUUU | 0.2% |
| 9405 | 4514 | GAGACUUGAgGAUGUuUUU | 1.7% |
| 9406 | 4514 | GAaACUUGAAGAUGUCUUU | 1.5% |
| 9407 | 4514 | GAGACUUcAAGAUGUCUUU | 0.1% |
| 9408 | 4514 | GAGACUUGAAaAUGUCUUU | 0.3% |
| 9409 | 4514 | GAGACUUGAAGAUGUaUUU | 2.5% |
| 9410 | 4514 | GAGACUUGAAuAUGUCUUU | 0.1% |
| 9411 | 4514 | GAaACUUGAgGAUGUCUUU | 0.1% |
| 9412 | 4514 | GAGACUgGAAGgUGUCUUU | 0.1% |
| 9413 | 4514 | GAGACaaGAAGAUGUCUUU | 0.2% |
| 9414 | 4514 | GAGACUcGAAGAcGUuUUU | 0.1% |
| 4515 | 4515 | CAGAGACUUGAAGAUGUCU | 91.9% |
| 9415 | 4515 | CAGAGACUUGAAGAUGUuU | 0.8% |
| 9416 | 4515 | CAGAGACUUGAgGAUGUCU | 0.4% |
| 9417 | 4515 | CAGAGgCUUGAAGAUGUCU | 0.2% |
| 9418 | 4515 | CAGAGACUUGAgGAUGUuU | 1.7% |
| 9419 | 4515 | CAGAaACUUGAAGAUGUCU | 1.5% |
| 9420 | 4515 | CAGAGACUUcAAGAUGUCU | 0.1% |
| 9421 | 4515 | CAGAGACUUGAAaAUGUCU | 0.3% |
| 9422 | 4515 | CAGAGACUUGAAGAUGUaU | 2.5% |
| 9423 | 4515 | CAGAGACUUGAAuAUGUCU | 0.1% |
| 9424 | 4515 | CAGAaACUUGAgGAUGUCU | 0.1% |
| 9425 | 4515 | CAGAGACUgGAAGgUGUCU | 0.1% |
| 9426 | 4515 | CAGAGACaaGAAGAUGUCU | 0.2% |
| 9427 | 4515 | CAGAGACUcGAAGAcGUuU | 0.1% |
| 4516 | 4516 | GUGCAGAUGCAACGAUUCA | 91.7% |
| 9428 | 4516 | GUGCAGAUGCAACGgUUCA | 1.8% |
| 9429 | 4516 | GUGCAGAUGCAgCGAUUCA | 3.2% |
| 9430 | 4516 | GUGCAGgUGCAACGAUUCA | 0.1% |
| 9431 | 4516 | GUGCAGAUGCAgCGgUUCA | 0.2% |
| 9432 | 4516 | GUaCAGAUGCAACGAUUCA | 0.1% |
| 9433 | 4516 | GUGCAaAUGCAACGAUUCA | 0.4% |
| 9434 | 4516 | GUaCAGAUGCAgCGAUUCA | 1.9% |
| 9435 | 4516 | GUGCAaAUGCAgCGAUUCA | 0.2% |
| 9436 | 4516 | GUaCAaAUGCAgCGAUUCA | 0.2% |
| 9437 | 4516 | GUGCAaAUGCAgaGAUUCA | 0.2% |
| 4517 | 4517 | UUCUGCUGGUGCACUUGCC | 91.7% |
| 9438 | 4517 | UUCUGCUGGUGCACUUGCu | 2.4% |
| 9439 | 4517 | UUCUGCUGGUGCgCUUGCC | 0.9% |
| 9440 | 4517 | cUCUGCUGGUGCACUUGCC | 1.0% |
| 9441 | 4517 | UUCcGCUGGUGCACUUGCC | 0.1% |
| 9442 | 4517 | UUCgGCUGGUGCACUUGCC | 0.1% |
| 9443 | 4517 | UUCUGCcGGUGCACUUGCC | 0.2% |
| 9444 | 4517 | UUCUGCUGGcGCACUUGCC | 0.1% |
| 4518 | 4518 | UGCAGAUGCAACGAUUCAA | 91.6% |
| 9445 | 4518 | UGCAGAUGCAACGAUUCAg | 0.2% |
| 9446 | 4518 | UGCAGAUGCAACGgUUCAA | 1.8% |
| 9447 | 4518 | UGCAGAUGCAgCGAUUCAA | 3.2% |
| 9448 | 4518 | UGCAGgUGCAACGAUUCAA | 0.1% |
| 9449 | 4518 | UGCAGAUGCAgCGgUUCAA | 0.2% |
| 9450 | 4518 | UaCAGAUGCAACGAUUCAA | 0.1% |
| 9451 | 4518 | UGCAaAUGCAACGAUUCAA | 0.4% |
| 9452 | 4518 | UaCAGAUGCAgCGAUUCAA | 1.9% |
| 9453 | 4518 | UGCAaAUGCAgCGAUUCAA | 0.2% |
| 9454 | 4518 | UaCAaAuGcAgCGAUUCAA | 0.2% |
| 9455 | 4518 | UGCAaAUGcAgaGAUUCAA | 0.2% |
| 4519 | 4519 | UAUGAGGGAAGAAUAUCGA | 91.5% |
| 9456 | 4519 | UAUGAGGGAAGAAUAUCGg | 1.0% |
| 9457 | 4519 | UAUGAGGGAAGAgUAUCGA | 1.5% |
| 9458 | 4519 | UAUGAGGGAgGAAUAUCGA | 0.8% |
| 9459 | 4519 | UAUGgGGGAAGAAUAUCGA | 0.1% |
| 9460 | 4519 | UAUGAGGGAAGAgUAUCGg | 1.8% |
| 9461 | 4519 | cAUGAGGGAAGAAUAUCGA | 0.8% |
| 9462 | 4519 | UAUGAGGGAAGAAUAcCGA | 0.2% |
| 9463 | 4519 | UAUGAGGGAAGAAUAUgGA | 0.1% |
| 9464 | 4519 | UuUGAGGGAAGAAUAUCGA | 0.3% |
| 9465 | 4519 | UuUGAGGGAAGAAUAUCGg | 0.3% |
| 9466 | 4519 | UAUGAGGGAAcAAUAUuGg | 0.1% |
| 9467 | 4519 | UAUGAGGGAAGAgUAcCGg | 1.3% |
| 9468 | 4519 | cAUGAGGGAAGAAUAUCaA | 0.1% |
| 9469 | 4519 | UAcUAGGGAAGAAUAUCGA | 0.1% |
| 9470 | 4519 | cAUGAGGGAAGAgUAUCaA | 0.1% |
| 4520 | 4520 | AUGGGGGUGCAGAUGCAAC | 91.3% |
| 9471 | 4520 | AUGGGGGUGCAGAUGCAgC | 1.5% |
| 9472 | 4520 | AUGGGGGUGCAGgUGCAAC | 0.1% |
| 9473 | 4520 | AUGGGaGUGCAGAUGCAAC | 2.3% |
| 9474 | 4520 | AUGGGGGUGCAaAUGCAAC | 0.3% |
| 9475 | 4520 | AUGGGaGUGCAGAUGCAgC | 1.8% |
| 9476 | 4520 | AUGGGaGUaCAGAUGCAAC | 0.1% |
| 9477 | 4520 | AUGGGaGUGCAaAUGCAAC | 0.1% |
| 9478 | 4520 | AUGGGaGUaCAGAUGCAgC | 1.9% |
| 9479 | 4520 | AUGGGaGUGCAaAUGCAgC | 0.2% |
| 4521 | 4521 | UGGGGGUGCAGAUGCAACG | 91.3% |
| 9480 | 4521 | UGGGGGUGCAGAUGCAgCG | 1.5% |
| 9481 | 4521 | UGGGGGUGCAGgUGCAACG | 0.1% |
| 9482 | 4521 | UGGGaGUGCAGAUGCAACG | 2.3% |
| 9483 | 4521 | UGGGGGUGCAaAUGCAACG | 0.3% |
| 9484 | 4521 | UGGGaGUGCAGAUGCAgCG | 1.8% |
| 9485 | 4521 | UGGGaGUaCAGAUGCAACG | 0.1% |
| 9486 | 4521 | UGGGaGUGCAaAUGCAACG | 0.1% |
| 9487 | 4521 | UGGGaGUaCAGAUGCAgCG | 1.9% |
| 9488 | 4521 | UGGGaGUGCAaAUGCAgCG | 0.2% |
| 4522 | 4522 | ACCUCUGACUAAGGGGAUU | 91.3% |
| 9489 | 4522 | ACCUCUGACUAgGGGGAUU | 0.1% |
| 9490 | 4522 | ACCUCUaACUAAGGGGAUU | 0.7% |
| 9491 | 4522 | ACCUCUGACaAAGGGGAUU | 0.4% |
| 9492 | 4522 | ACCUCUGACcAAGGGGAUU | 0.2% |
| 9493 | 4522 | ACCUCUGACUAAaGGGAUU | 2.0% |
| 9494 | 4522 | ACCUCUGACUAAGGGaAUU | 3.0% |
| 9495 | 4522 | ACCUCUGACUAAGGGGAUc | 1.9% |
| 9496 | 4522 | ACCUCUGACUAAGGGuAUU | 0.1% |
| 9497 | 4522 | ACCUCUuACUAAGGGGAUU | 0.1% |
| 9498 | 4522 | ACCUCUaACUAAGGGGAUc | 0.2% |
| 9499 | 4522 | ACCUCUGACcAAGGGaAUU | 0.1% |
| 4523 | 4523 | UGGAUUCUUGAUCGUCUUU | 91.1% |
| 9500 | 4523 | UGGAUUuUUGAUCGUCUUU | 0.7% |
| 9501 | 4523 | UGGAUcCUUGAUCGUCUUU | 0.1% |
| 9502 | 4523 | UGGAUUCUUaAUCGUCUUU | 0.3% |
| 9503 | 4523 | UGGAUUCUUGAUCaUCUUU | 0.2% |
| 9504 | 4523 | UGGAUUCUUGAUCGcCUUU | 1.0% |
| 9505 | 4523 | UGGAUUgUUGAUCGUCUUU | 0.1% |
| 9506 | 4523 | UGGAUUaUUGAUCGcCUUU | 5.6% |
| 9507 | 4523 | UGGAUUaUUGAUCGgCUUU | 1.0% |
| 4524 | 4524 | GGAUUCUUGAUCGUCUUUU | 91.1% |
| 9508 | 4524 | GGAUUuUUGAUCGUCUUUU | 0.7% |
| 9509 | 4524 | GGAUcCUUGAUCGUCUUUU | 0.1% |
| 9510 | 4524 | GGAUUCUUaAUCGUCUUUU | 0.3% |
| 9511 | 4524 | GGAUUCUUGAUCaUCUUUU | 0.2% |
| 9512 | 4524 | GGAUUCUUGAUCGcCUUUU | 1.0% |
| 9513 | 4524 | GGAUUgUUGAUCGUCUUUU | 0.1% |
| 9514 | 4524 | GGAUUaUUGAUCGcCUUUU | 5.6% |
| 9515 | 4524 | GGAUUaUUGAUCGgCUUUU | 1.0% |
| 4525 | 4525 | GGGGUGCAGAUGCAACGAU | 90.8% |
| 9516 | 4525 | GGGGUGCAGAUGCAACGgU | 0.5% |
| 9517 | 4525 | GGGGUGCAGAUGCAgCGAU | 1.5% |
| 9518 | 4525 | GGGGUGCAGgUGCAACGAU | 0.1% |
| 9519 | 4525 | GGaGUGCAGAUGCAACGAU | 1.0% |
| 9520 | 4525 | GGGGUGCAaAUGCAACGAU | 0.3% |
| 9521 | 4525 | GGaGUGCAGAUGCAACGgU | 1.3% |
| 9522 | 4525 | GGaGUGCAGAUGCAgCGAU | 1.6% |
| 9523 | 4525 | GGaGUGCAGAUGCAgCGgU | 0.2% |
| 9524 | 4525 | GGaGUaCAGAUGCAACGAU | 0.1% |
| 9525 | 4525 | GGaGUGCAaAUGCAACGAU | 0.1% |
| 9526 | 4525 | GGaGUaCAGAUGCAgCGAU | 1.9% |
| 9527 | 4525 | GGaGUGCAaAUGCAgCGAU | 0.2% |
| 4526 | 4526 | GGGUGCAGAUGCAACGAUU | 90.8% |
| 9528 | 4526 | GGGUGCAGAUGCAACGgUU | 0.5% |
| 9529 | 4526 | GGGUGCAGAUGCAgCGAUU | 1.5% |
| 9530 | 4526 | GGGUGCAGgUGCAACGAUU | 0.1% |
| 9531 | 4526 | GaGUGCAGAUGCAACGAUU | 1.0% |
| 9532 | 4526 | GGGUGCAaAUGCAACGAUU | 0.3% |
| 9533 | 4526 | GaGUGCAGAUGCAACGgUU | 1.3% |
| 9534 | 4526 | GaGUGCAGAUGCAgCGAUU | 1.6% |
| 9535 | 4526 | GaGUGCAGAUGCAgCGgUU | 0.2% |
| 9536 | 4526 | GaGUaCAGAUGCAACGAUU | 0.1% |
| 9537 | 4526 | GaGUGCAaAUGCAACGAUU | 0.1% |
| 9538 | 4526 | GaGUaCAGAUGCAgCGAUU | 1.9% |
| 9539 | 4526 | GaGUGCAaAUGCAgCGAUU | 0.2% |
| 4527 | 4527 | GUGGAUUCUUGAUCGUCUU | 90.8% |
| 9540 | 4527 | GUGGAUUuUUGAUCGUCUU | 0.7% |
| 9541 | 4527 | aUGGAUUCUUGAUCGUCUU | 0.3% |
| 9542 | 4527 | GUGGAUcCUUGAUCGUCUU | 0.1% |
| 9543 | 4527 | GUGGAUUCUUaAUCGUCUU | 0.3% |
| 9544 | 4527 | GUGGAUUCUUGAUCaUCUU | 0.2% |
| 9545 | 4527 | GUGGAUUCUUGAUCGcCUU | 1.0% |
| 9546 | 4527 | GUGGAUUgUUGAUCGUCUU | 0.1% |
| 9547 | 4527 | GUGGAUUaUUGAUCGcCUU | 5.6% |
| 9548 | 4527 | GUGGAUUaUUGAUCGgCUU | 1.0% |
| 4528 | 4528 | GGUGCAGAUGCAACGAUUC | 90.8% |
| 9549 | 4528 | GGUGCAGAUGCAACGgUUC | 0.5% |
| 9550 | 4528 | GGUGCAGAUGCAgCGAUUC | 1.5% |
| 9551 | 4528 | GGUGCAGgUGCAACGAUUC | 0.1% |
| 9552 | 4528 | aGUGCAGAUGCAACGAUUC | 1.0% |
| 9553 | 4528 | GGUGCAaAUGCAACGAUUC | 0.3% |
| 9554 | 4528 | aGUGCAGAUGCAACGgUUC | 1.3% |
| 9555 | 4528 | aGUGCAGAUGCAgCGAUUC | 1.6% |
| 9556 | 4528 | aGUGCAGAUGCAgCGgUUC | 0.2% |
| 9557 | 4528 | aGUaCAGAUGCAACGAUUC | 0.1% |
| 9558 | 4528 | aGUGCAaAUGCAACGAUUC | 0.1% |
| 9559 | 4528 | aGUaCAGAUGCAgCGAUUC | 1.9% |
| 9560 | 4528 | aGUGCAaAUGCAgCGAUUC | 0.2% |
| 4529 | 4529 | GGGGGUGCAGAUGCAACGA | 90.8% |
| 9561 | 4529 | GGGGGUGCAGAUGCAACGg | 0.5% |
| 9562 | 4529 | GGGGGUGCAGAUGCAgCGA | 1.5% |
| 9563 | 4529 | GGGGGUGCAGgUGCAACGA | 0.1% |
| 9564 | 4529 | GGGaGUGCAGAUGCAACGA | 1.0% |
| 9565 | 4529 | GGGGGUGCAaAUGCAACGA | 0.3% |
| 9566 | 4529 | GGGaGUGCAGAUGCAACGg | 1.3% |
| 9567 | 4529 | GGGaGUGCAGAUGCAgCGA | 1.6% |
| 9568 | 4529 | GGGaGUGCAGAUGCAgCGg | 0.2% |
| 9569 | 4529 | GGGaGUaCAGAUGCAACGA | 0.1% |
| 9570 | 4529 | GGGaGUGCAaAUGCAACGA | 0.1% |
| 9571 | 4529 | GGGaGUaCAGAUGCAgCGA | 1.9% |
| 9572 | 4529 | GGGaGUGCAaAUGCAgCGA | 0.2% |
| 4530 | 4530 | CUCUGACUAAGGGGAUUUU | 90.7% |
| 9573 | 4530 | CUCUGACUAgGGGGAUUUU | 0.1% |
| 9574 | 4530 | CUCUaACUAAGGGGAUUUU | 0.7% |
| 9575 | 4530 | CUCUGACaAAGGGGAUUUU | 0.4% |
| 9576 | 4530 | CUCUGACcAAGGGGAUUUU | 0.2% |
| 9577 | 4530 | CUCUGACUAAaGGGAUUUU | 2.0% |
| 9578 | 4530 | CUCUGACUAAGGGaAUUUU | 3.0% |
| 9579 | 4530 | CUCUGACUAAGGGGAUcUU | 0.5% |
| 9580 | 4530 | CUCUGACUAAGGGGAUUcU | 0.6% |
| 9581 | 4530 | CUCUGACUAAGGGuAUUUU | 0.1% |
| 9582 | 4530 | CUCUuACUAAGGGGAUUUU | 0.1% |
| 9583 | 4530 | CUCUGACcAAGGGaAUUUU | 0.1% |
| 9584 | 4530 | CUCUGACUAAGGGGAUccU | 1.4% |
| 4531 | 4531 | CCUCUGACUAAGGGGAUUU | 90.7% |
| 9585 | 4531 | CCUCUGACUAgGGGGAUUU | 0.1% |
| 9586 | 4531 | CCUCUaACUAAGGGGAUUU | 0.7% |
| 9587 | 4531 | CCUCUGACaAAGGGGAUUU | 0.4% |
| 9588 | 4531 | CCUCUGACcAAGGGGAUUU | 0.2% |
| 9589 | 4531 | CCUCUGACUAAaGGGAUUU | 2.0% |
| 9590 | 4531 | CCUCUGACUAAGGGaAUUU | 3.0% |
| 9591 | 4531 | CCUCUGACUAAGGGGAUcU | 0.5% |
| 9592 | 4531 | CCUCUGACUAAGGGGAUUc | 0.6% |
| 9593 | 4531 | CCUCUGACUAAGGGuAUUU | 0.1% |
| 9594 | 4531 | CCUCUuACUAAGGGGAUUU | 0.1% |
| 9595 | 4531 | CCUCUGACcAAGGGaAUUU | 0.1% |
| 9596 | 4531 | CCUCUGACUAAGGGGAUcc | 1.4% |
| 4532 | 4532 | UGUGGAUUCUUGAUCGUCU | 90.7% |
| 9597 | 4532 | UGUGGAUUuUUGAUCGUCU | 0.7% |
| 9598 | 4532 | cGUGGAUUCUUGAUCGUCU | 0.1% |
| 9599 | 4532 | UaUGGAUUCUUGAUCGUCU | 0.3% |
| 9600 | 4532 | UGUGGAUcCUUGAUCGUCU | 0.1% |
| 9601 | 4532 | UGUGGAUUCUUaAUCGUCU | 0.3% |
| 9602 | 4532 | UGUGGAUUCUUGAUCaUCU | 0.2% |
| 9603 | 4532 | UGUGGAUUCUUGAUCGcCU | 1.0% |
| 9604 | 4532 | UGUGGAUUgUUGAUCGUCU | 0.1% |
| 9605 | 4532 | UGUGGAUUaUUGAUCGcCU | 5.6% |
| 9606 | 4532 | UGUGGAUUaUUGAUCGgCU | 1.0% |
| 4533 | 4533 | UCUUCUUGAAAAUUUGCAG | 90.5% |
| 9607 | 4533 | UCUUuUUGAAAAUUUGCAG | 0.1% |
| 9608 | 4533 | cCUUCUUGAAAAUUUGCAG | 0.1% |
| 9609 | 4533 | UCUcCUUGAAAAUUUGCAG | 5.9% |
| 9610 | 4533 | UCUUaUUGAAAAUUUGCAG | 1.7% |
| 9611 | 4533 | UCUUCUcGAAAAUUUGCAG | 0.1% |
| 9612 | 4533 | UCUUCUUGAAAAaUUGCAG | 0.1% |
| 9613 | 4533 | UCUUCUUGAAAAcUUGCAG | 0.5% |
| 9614 | 4533 | UCUUCUUGAAAAUUUaCAG | 0.8% |
| 9615 | 4533 | UCUCaUUGAAAAUUUGCAG | 0.2% |
| 9616 | 4533 | UCUcCUUGAuAAUUUGCAG | 0.1% |
| 4534 | 4534 | AUGGCUAAAGACAAGACCA | 90.5% |
| 9617 | 4534 | AUGGCUAAAGACAAGACCg | 3.0% |
| 9618 | 4534 | AUGGCUAAAGACAAGgCCA | 0.4% |
| 9619 | 4534 | AUGGCUgAAGACAAGACCA | 0.1% |
| 9620 | 4534 | gUGGCUAAAGACAAGACCA | 4.9% |
| 9621 | 4534 | AUGGuUAAAGACAAGACCg | 0.1% |
| 9622 | 4534 | gUGGCUAAAGACAAGACCg | 0.5% |
| 9623 | 4534 | AUGGCUAAAGACAAaACCA | 0.2% |
| 9624 | 4534 | AUGGCUAAAGACAAGACCc | 0.1% |
| 9625 | 4534 | AUGGCUAAAGACAAGACCu | 0.1% |
| 9626 | 4534 | AUGGCUAAAGACuAGACCu | 0.2% |
| 4535 | 4535 | AUCUUCUUGAAAAUUUGCA | 90.5% |
| 9627 | 4535 | AUCUUuUUGAAAAUUUGCA | 0.1% |
| 9628 | 4535 | AcCUUCUUGAAAAUUUGCA | 0.1% |
| 9629 | 4535 | AUCUcCUUGAAAAUUUGCA | 5.9% |
| 9630 | 4535 | AUCUUaUUGAAAAUUUGCA | 1.7% |
| 9631 | 4535 | AUCUUCUcGAAAAUUUGCA | 0.1% |
| 9632 | 4535 | AUCUUCUUGAAAAaUUGCA | 0.1% |
| 9633 | 4535 | AUCUUCUUGAAAAcUUGCA | 0.5% |
| 9634 | 4535 | AUCUUCUUGAAAAUUUaCA | 0.8% |
| 9635 | 4535 | AUCUCaUUGAAAAUUUGCA | 0.2% |
| 9636 | 4535 | AUCUcCUUGAuAAUUUGCA | 0.1% |
| 4536 | 4536 | GAAUGGGGGUGCAGAUGCA | 90.4% |
| 9637 | 4536 | GAAUGGGGGUGCAGgUGCA | 0.1% |
| 9638 | 4536 | GgAUGGGGGUGCAGAUGCA | 2.4% |
| 9639 | 4536 | GAAUGGGaGUGCAGAUGCA | 3.9% |
| 9640 | 4536 | GAAUGGGGGUGCAaAUGCA | 0.3% |
| 9641 | 4536 | GgAUGGGaGUGCAGAUGCA | 0.2% |
| 9642 | 4536 | GAAUGGGaGUaCAGAUGCA | 2.0% |
| 9643 | 4536 | GgAUGGGaGUGCAaAUGCA | 0.5% |
| 4537 | 4537 | CGAAUGGGGGUGCAGAUGC | 90.2% |
| 9644 | 4537 | CGAAUGGGGGUGCAGgUGC | 0.1% |
| 9645 | 4537 | CGgAUGGGGGUGCAGAUGC | 2.4% |
| 9646 | 4537 | aGAAUGGGGGUGCAGAUGC | 0.2% |
| 9647 | 4537 | CGAAUGGGaGUGCAGAUGC | 3.9% |
| 9648 | 4537 | CGAAUGGGGGUGCAaAUGC | 0.3% |
| 9649 | 4537 | CGgAUGGGaGUGCAGAUGC | 0.2% |
| 9650 | 4537 | CGAAUGGGaGUaCAGAUGC | 2.0% |
| 9651 | 4537 | CGgAUGGGaGUGCAaAUGC | 0.5% |
| 4538 | 4538 | AAUGGGGGUGCAGAUGCAA | 90.2% |
| 9652 | 4538 | AAUGGGGGUGCAGAUGCAg | 0.2% |
| 9653 | 4538 | AAUGGGGGUGCAGgUGCAA | 0.1% |
| 9654 | 4538 | gAUGGGGGUGCAGAUGCAA | 1.1% |
| 9655 | 4538 | gAUGGGGGUGCAGAUGCAg | 1.3% |
| 9656 | 4538 | AAUGGGaGUGCAGAUGCAA | 2.3% |
| 9657 | 4538 | AAUGGGGGUGCAaAUGCAA | 0.3% |
| 9658 | 4538 | AAUGGGaGUGCAGAUGCAg | 1.6% |
| 9659 | 4538 | gAUGGGaGUGCAGAUGCAg | 0.2% |
| 9660 | 4538 | AAUGGGaGUaCAGAUGCAA | 0.1% |
| 9661 | 4538 | AAUGGGaGUaCAGAUGCAg | 1.9% |
| 9662 | 4538 | gAUGGGaGUGCAaAUGCAA | 0.1% |

TABLE 20-6

Conserved and minor variant 19-mer sequences
from the Influenza A segment 8 (NS1 & NS2) se-
quences listed in Table 1-8. The conserved se-
quences match at least 89% of the listed viral
sequences, and the variants contain 3 or fewer
nucleotide changes from the reference sequence.

| | | | |
|---|---|---|---|
| Seq | Ref | | |
| ID | ID | Match Seq | Total |

| | | | |
|---|---|---|---|
| 5021 | 5021 | AUAACACAGUUCGAGUCUC | 98.2% |
| 9663 | 5021 | gUAACACgGUUCGAGUCUC | 0.4% |
| 9664 | 5021 | AUAACACAGCUCGAGUCUC | 0.1% |
| 9665 | 5021 | AUAACACAGUUaGAGUCUC | 0.1% |
| 9666 | 5021 | AUAACACAGUUCaAGUCUC | 0.2% |
| 9667 | 5021 | AUAACACAGUUCGAGUCaC | 0.6% |
| 9668 | 5021 | AUAACACuGUUCGAGUCUC | 0.1% |
| 9669 | 5021 | AUAAnACAGUUCGAGUCUC | 0.1% |
| 9670 | 5021 | AUAACACAGUUCaAGUCaC | 0.2% |
| 5022 | 5022 | UAACACAGUUCGAGUCUCU | 98.2% |
| 9671 | 5022 | UAACACgGUUCGAGUCUCU | 0.4% |
| 9672 | 5022 | UAACACAGcUCGAGUCUCU | 0.1% |
| 9673 | 5022 | UAACACAGUUaGAGUCUCU | 0.1% |
| 9674 | 5022 | UAACACAGUUCaAGUCUCU | 0.2% |
| 9675 | 5022 | UAACACAGUUCGAGUCaCU | 0.6% |
| 9676 | 5022 | UAACACuGUUCGAGUCUCU | 0.1% |
| 9677 | 5022 | UAAnACAGUUCGAGUCUCU | 0.1% |
| 9678 | 5022 | UAACACAGUUCaAGUCaCU | 0.2% |
| 5023 | 5023 | UGAAUGGAAUGAUAACACA | 98.0% |
| 9679 | 5023 | UGAAUGGAgUGAUAACACA | 0.1% |
| 9680 | 5023 | UGAgUGGAAUGAUAACACA | 0.2% |
| 9681 | 5023 | UGAAUGGAAUGgUAACACg | 0.4% |
| 9682 | 5023 | UGAAUGGAAUaAUAACACA | 1.1% |
| 9683 | 5023 | UGAAUGGAAUGAUAAnACA | 0.1% |
| 9684 | 5023 | UGAAUGGAgUGAUAACACu | 0.1% |
| 5024 | 5024 | GAAUGGAAUGAUAACACAG | 98.0% |
| 9685 | 5024 | GAAUGGAgUGAUAACACAG | 0.1% |
| 9686 | 5024 | GAgUGGAAUGAUAACACAG | 0.2% |
| 9687 | 5024 | GAAUGGAAUGgUAACACgG | 0.4% |
| 9688 | 5024 | GAAUGGAAUaAUAACACAG | 1.1% |
| 9689 | 5024 | GAAUGGAAUGAUAAnACAG | 0.1% |
| 9690 | 5024 | GAAUGGAgUGAUAACACuG | 0.1% |
| 5025 | 5025 | UGGAAUGAUAACACAGUUC | 98.0% |
| 9691 | 5025 | UGGAgUGAUAACACAGUUC | 0.1% |
| 9692 | 5025 | UGGAAUGgUAACACgGUUC | 0.4% |
| 9693 | 5025 | UGGAAUaAUAACACAGUUC | 1.1% |
| 9694 | 5025 | UGGAAUGAUAACACAGcUC | 0.1% |
| 9695 | 5025 | UGGAAUGAUAACACAGUUa | 0.1% |
| 9696 | 5025 | UGGAAUGAUAAnACAGUUC | 0.1% |
| 9697 | 5025 | UGGAgUGAUAACACuGUUC | 0.1% |
| 5026 | 5026 | AUGGAAUGAUAACACAGUU | 97.9% |
| 9698 | 5026 | AUGGAgUGAUAACACAGUU | 0.1% |
| 9699 | 5026 | gUGGAAUGAUAACACAGUU | 0.2% |
| 9700 | 5026 | AUGGAAUGgUAACACgGUU | 0.4% |
| 9701 | 5026 | AUGGAAUaAUAACACAGUU | 1.1% |
| 9702 | 5026 | AUGGAAUGAUAACACAGcU | 0.1% |
| 9703 | 5026 | AUGGAAUGAUAAnACAGUU | 0.1% |
| 9704 | 5026 | AUGGAgUGAUAACAcuGUU | 0.1% |
| 5027 | 5027 | AAUGGAAUGAUAACACAGU | 97.9% |
| 9705 | 5027 | AAUGGAgUGAUAACACAGU | 0.1% |
| 9706 | 5027 | AgUGGAAUGAUAACACAGU | 0.2% |
| 9707 | 5027 | AAUGGAAUGgUAACACgGU | 0.4% |
| 9708 | 5027 | AAUGGAAUaAUAACACAGU | 1.1% |
| 9709 | 5027 | AAUGGAAUGAUAACACAGc | 0.1% |
| 9710 | 5027 | AAUGGAAUGAUAAnACAGU | 0.1% |
| 9711 | 5027 | AAUGGAgUGAUAACACuGU | 0.1% |
| 5028 | 5028 | UUGAAUGGAAUGAUAACAC | 97.8% |
| 9712 | 5028 | UUGAAUGGAAUGgUAACAC | 0.4% |
| 9713 | 5028 | UUGAAUGGAgUGAUAACAC | 0.2% |
| 9714 | 5028 | UUGAgUGGAAUGAUAACAC | 0.2% |
| 9715 | 5028 | nUGAAUGGAAUGAUAACAC | 0.2% |
| 9716 | 5028 | UUGAAUGGAAUaAUAACAC | 1.1% |
| 9717 | 5028 | UUGAAUGGAAUGAUAAnAC | 0.1% |
| 5029 | 5029 | UGAUAACACAGUUCGAGUC | 97.7% |
| 9718 | 5029 | UGgUAACACgGUUCGAGUC | 0.4% |
| 9719 | 5029 | UaAUAACACAGUUCGAGUC | 1.1% |
| 9720 | 5029 | UGAUAACACAGcUCGAGUC | 0.1% |
| 9721 | 5029 | UGAUAACACAGUUaGAGUC | 0.1% |
| 9722 | 5029 | UGAUAACACAGUUCaAGUC | 0.4% |
| 9723 | 5029 | UGAUAACACuGUUCGAGUC | 0.1% |
| 9724 | 5029 | UGAUAAnACAGUUCGAGUC | 0.1% |
| 5030 | 5030 | AUGAUAACACAGUUCGAGU | 97.6% |
| 9725 | 5030 | gUGAUAACACAGUUCGAGU | 0.1% |
| 9726 | 5030 | AUGgUAACACgGUUCGAGU | 0.4% |
| 9727 | 5030 | AUaAUAACACAGUUCGAGU | 1.1% |
| 9728 | 5030 | AUGAUAACACAGcUCGAGU | 0.1% |
| 9729 | 5030 | AUGAUAACACAGUUaGAGU | 0.1% |
| 9730 | 5030 | AUGAUAACACAGUUCaAGU | 0.4% |
| 9731 | 5030 | AUGAUAAnACAGUUCGAGU | 0.1% |
| 9732 | 5030 | gUGAUAACACuGUUCGAGU | 0.1% |
| 5031 | 5031 | GGAAUGAUAACACAGUUCG | 97.6% |
| 9733 | 5031 | GGAgUGAUAACACAGUUCG | 0.1% |
| 9734 | 5031 | GGAAUGgUAACACgGUUCG | 0.4% |
| 9735 | 5031 | GGAAUaAUAACACAGUUCG | 1.1% |
| 9736 | 5031 | GGAAUGAUAACACAGcUCG | 0.1% |
| 9737 | 5031 | GGAAUGAUAACACAGUUaG | 0.1% |
| 9738 | 5031 | GGAAUGAUAACACAGUUCa | 0.4% |
| 9739 | 5031 | GGAAUGAUAAnACAGUUCG | 0.1% |
| 9740 | 5031 | GGAgUGAUAACACuGUUCG | 0.1% |
| 5032 | 5032 | GAAUGAUAACACAGUUCGA | 97.6% |
| 9741 | 5032 | GAgUGAUAACACAGUUCGA | 0.1% |
| 9742 | 5032 | GAAUGgUAACACgGUUCGA | 0.4% |
| 9743 | 5032 | GAAUaAUAACACAGUUCGA | 1.1% |
| 9744 | 5032 | GAAUGAUAACACAGcUCGA | 0.1% |
| 9745 | 5032 | GAAUGAUAACACAGUUaGA | 0.1% |
| 9746 | 5032 | GAAUGAUAACACAGUUCaA | 0.4% |
| 9747 | 5032 | GAAUGAUAAnACAGUUCGA | 0.1% |
| 9748 | 5032 | GAgUGAUAACACuGUUCGA | 0.1% |
| 5033 | 5033 | AAUGAUAACACAGUUCGAG | 97.6% |
| 9749 | 5033 | AgUGAUAACACAGUUCGAG | 0.1% |
| 9750 | 5033 | AAUGgUAACACgGUUCGAG | 0.4% |
| 9751 | 5033 | AAUaAUAACACAGUUCGAG | 1.1% |
| 9752 | 5033 | AAUGAUAACACAGcUCGAG | 0.1% |
| 9753 | 5033 | AAUGAUAACACAGUUaGAG | 0.1% |
| 9754 | 5033 | AAUGAUAACACAGUUCaAG | 0.4% |
| 9755 | 5033 | AAUGAUAAnACAGUUCGAG | 0.1% |
| 9756 | 5033 | AgUGAUAACACuGUUCGAG | 0.1% |
| 5034 | 5034 | CUUGAAUGGAAUGAUAACA | 97.5% |
| 9757 | 5034 | CUUGAAUGGAAUGgUAACA | 0.4% |
| 9758 | 5034 | CUUGAAUGGAgUGAUAACA | 0.2% |
| 9759 | 5034 | CUUGAgUGGAAUGAUAACA | 0.2% |
| 9760 | 5034 | uUUGAAUGGAAUGAUAACA | 0.3% |
| 9761 | 5034 | CUUGAAUGGAAUaAUAACA | 1.1% |
| 9762 | 5034 | CUUGAAUGGAAUGAUAAnA | 0.1% |
| 9763 | 5034 | nnUGAAUGGAAUGAUAACA | 0.2% |
| 5035 | 5035 | GAUAACACAGUUCGAGUCU | 97.1% |
| 9764 | 5035 | GgUAACACgGUUCGAGUCU | 0.4% |
| 9765 | 5035 | aAUAACACAGUUCGAGUCU | 1.1% |
| 9766 | 5035 | GAUAACACAGcUCGAGUCU | 0.1% |
| 9767 | 5035 | GAUAACACAGUUaGAGUCU | 0.1% |
| 9768 | 5035 | GAUAACACAGUUCaAGUCU | 0.2% |
| 9769 | 5035 | GAUAACACAGUUCGAGUCa | 0.6% |
| 9770 | 5035 | GAUAACACuGUUCGAGUCU | 0.1% |
| 9771 | 5035 | GAUAAnACAGUUCGAGUCU | 0.1% |
| 9772 | 5035 | GAUAACACAGUUCaAGUCa | 0.2% |
| 5036 | 5036 | AUGUCAAAAAUGCAAUUGG | 96.9% |
| 9773 | 5036 | AUGUCAAAAAUGCAgUUGG | 1.5% |
| 9774 | 5036 | AUGUCAAAAAUGCgAUUGG | 1.0% |
| 9775 | 5036 | AUGUCAAAgAUGCAAUUGG | 0.1% |
| 9776 | 5036 | AUGUCAAAAAUGCAAUUaG | 0.1% |
| 9777 | 5036 | AUGUCAAAAuUGCAAUUGG | 0.5% |
| 5037 | 5037 | GGAUGUCAAAAAUGCAAUU | 96.9% |
| 9778 | 5037 | GGAUGUCAAAAAUGCAgUU | 1.5% |
| 9779 | 5037 | GGAUGUCAAAAAUGCgAUU | 1.0% |
| 9780 | 5037 | GGAUGUCAAAgAUGCAAUU | 0.1% |
| 9781 | 5037 | GaAUGUCAAAAAUGCAAUU | 0.1% |
| 9782 | 5037 | GGAUGUCAAAAuUGCAAUU | 0.5% |
| 5038 | 5038 | AGGAUGUCAAAAAUGCAAU | 96.9% |
| 9783 | 5038 | AGGAUGUCAAAAAUGCAgU | 1.5% |
| 9784 | 5038 | AGGAUGUCAAAAAUGCgAU | 1.0% |
| 9785 | 5038 | AGGAUGUCAAAgAUGCAAU | 0.1% |
| 9786 | 5038 | AGaAUGUCAAAAAUGCAAU | 0.1% |
| 9787 | 5038 | AGGAUGUCAAAAuUGCAAU | 0.5% |
| 5039 | 5039 | GAGGAUGUCAAAAAUGCAA | 96.8% |
| 9788 | 5039 | GAGGAUGUCAAAAAUGCAg | 1.5% |
| 9789 | 5039 | GAGGAUGUCAAAAAUGCgA | 1.0% |
| 9790 | 5039 | GAGGAUGUCAAAgAUGCAA | 0.1% |
| 9791 | 5039 | aAGGAUGUCAAAAAUGCAA | 0.1% |
| 9792 | 5039 | GAGaAUGUCAAAAAUGCAA | 0.1% |
| 9793 | 5039 | GAGGAUGUCAAAAuUGCAA | 0.5% |
| 5040 | 5040 | GAUGUCAAAAAUGCAAUUG | 96.8% |
| 9794 | 5040 | GAUGUCAAAAAUGCAgUUG | 1.5% |
| 9795 | 5040 | GAUGUCAAAAAUGCgAUUG | 1.0% |
| 9796 | 5040 | GAUGUCAAAgAUGCAAUUG | 0.1% |
| 9797 | 5040 | aAUGUCAAAAAUGCAAUUG | 0.1% |
| 9798 | 5040 | GAUGUCAAAAAUGCAAUUa | 0.1% |
| 9799 | 5040 | GAUGUCAAAAuUGCAAUUG | 0.5% |
| 5041 | 5041 | UGAGGAUGUCAAAAAUGCA | 96.4% |
| 9800 | 5041 | UGAGGAUGUCAAAAAUGCg | 1.0% |
| 9801 | 5041 | UGAGGAUGUCAAAgAUGCA | 0.1% |
| 9802 | 5041 | aGAGGAUGUCAAAAAUGCA | 1.5% |
| 9803 | 5041 | cGAGGAUGUCAAAAAUGCA | 0.4% |
| 9804 | 5041 | UaAGGAUGUCAAAAAUGCA | 0.1% |
| 9805 | 5041 | UGAGaAUGUCAAAAAUGCA | 0.1% |
| 9806 | 5041 | UGAGGAUGUCAAAAuUGCA | 0.5% |
| 5042 | 5042 | CGGCUUCGCCGAGAUCAGA | 96.2% |
| 9807 | 5042 | CGGCUUCGCCGgGAUCAGA | 0.5% |
| 9808 | 5042 | aGGCUUCGCCGAGAUCAGA | 0.1% |
| 9809 | 5042 | CGaCUUCGCCGAGAUCAGA | 0.8% |
| 9810 | 5042 | CGGaUUCGCCGAGAUCAGA | 0.1% |
| 9811 | 5042 | CGGCUcCGCCGAGAUCAGA | 0.3% |
| 9812 | 5042 | CGGCUUCaCCGAGAUCAGA | 0.1% |
| 9813 | 5042 | CGGCUUCGCaGAGAUCAGA | 0.1% |
| 9814 | 5042 | CGGCUUCGCCGAGAcCAGA | 0.3% |
| 9815 | 5042 | CGGCUUCGCCGAGAUaAGA | 0.1% |
| 9816 | 5042 | CGGCUUCGCCGAGAUCAaA | 0.4% |
| 9817 | 5042 | CGGCUUCGCCGAuAUCAGA | 0.2% |
| 9818 | 5042 | CGGgUUuGCCGAGAUCAGA | 0.1% |
| 9819 | 5042 | aGaCUUCGCCGAGAUCAGA | 0.1% |
| 9820 | 5042 | CGaCUUCGCaGAGAUCAGA | 0.1% |
| 9821 | 5042 | CGGCUcCGCCGAGAUCAaA | 0.3% |
| 9822 | 5042 | CGGCUUCGCCGAnnUCAGA | 0.1% |
| 5043 | 5043 | UGUCAAAAAUGCAAUUGGG | 95.6% |
| 9823 | 5043 | UGUCAAAAAUGCAgUUGGG | 1.0% |
| 9824 | 5043 | UGUCAAAAAUGCgAUUGGG | 1.0% |
| 9825 | 5043 | UGUCAAAgAUGCAAUUGGG | 0.1% |
| 9826 | 5043 | UGUCAAAAAUGCAAUUaGG | 0.1% |
| 9827 | 5043 | UGUCAAAAAUGCAAUUGGa | 0.1% |
| 9828 | 5043 | UGUCAAAAAUGCAAUUGGc | 1.2% |
| 9829 | 5043 | UGUCAAAAuUGCAAUUGGG | 0.5% |
| 9830 | 5043 | UGUCAAAAAUGCAgUUGGa | 0.5% |
| 5044 | 5044 | UCUACAGAGAUUCGCUUGG | 95.5% |
| 9831 | 5044 | UCUACAGAGAUUuGCUUGG | 0.2% |
| 9832 | 5044 | UaUACAGAGAUUCGCUUGG | 1.3% |
| 9833 | 5044 | UCUACAGAaAUUCGCUUGG | 0.1% |
| 9834 | 5044 | UCUACAGAGAUUCaCUUGG | 2.6% |
| 9835 | 5044 | UCUACAGAGAUUCGCUUGa | 0.2% |
| 9836 | 5044 | UCUACAGAGAUUCGCUUnG | 0.1% |
| 9837 | 5044 | UCUACAGAGAUUCuCUUGG | 0.1% |
| 5045 | 5045 | GCAAUUGGGGUCCUCAUCG | 94.8% |
| 9838 | 5045 | GCAAUUGGGGUCCUCgUCG | 0.1% |
| 9839 | 5045 | GCAAUUGGGGUuCUCAUCG | 0.1% |
| 9840 | 5045 | GCAgUUGGGGUCCUCAUCG | 1.0% |
| 9841 | 5045 | GCgAUUGGGGUCCUCAUCG | 1.0% |
| 9842 | 5045 | GCAAUUaGGGUCCUCAUCG | 0.1% |
| 9843 | 5045 | GCAAUUGGaGUCCUCAUCG | 0.1% |
| 9844 | 5045 | GCAAUUGGcGUCCUCAUCG | 1.2% |
| 9845 | 5045 | GCAAUUGGGaUCCUCAUCG | 1.0% |
| 9846 | 5045 | GCAAUUGGGcUCCUCAUCG | 0.1% |
| 9847 | 5045 | GCAgUUGGaGUCCUCAUCG | 0.5% |
| 9848 | 5045 | GCAAUUGGGaUCCUCAUCa | 0.1% |
| 5046 | 5046 | CAAUUGGGGUCCUCAUCGG | 94.8% |
| 9849 | 5046 | CAAUUGGGGUCCUCgUCGG | 0.1% |
| 9850 | 5046 | CAAUUGGGGUuCUCAUCGG | 0.1% |
| 9851 | 5046 | CAgUUGGGGUCCUCAUCGG | 1.0% |
| 9852 | 5046 | CgAUUGGGGUCCUCAUCGG | 1.0% |
| 9853 | 5046 | CAAUUaGGGUCCUCAUCGG | 0.1% |
| 9854 | 5046 | CAAUUGGaGUCCUCAUCGG | 0.1% |
| 9855 | 5046 | CAAUUGGcGUCCUCAUCGG | 1.2% |
| 9856 | 5046 | CAAUUGGGaUCCUCAUCGG | 1.0% |
| 9857 | 5046 | CAAUUGGGcUCCUCAUCGG | 0.1% |
| 9858 | 5046 | CAgUUGGaGUCCUCAUCGG | 0.5% |
| 5047 | 5047 | UGCAAUUGGGGUCCUCAUC | 94.8% |
| 9859 | 5047 | UGCAAUUGGGGUCCUCgUC | 0.1% |
| 9860 | 5047 | UGCAAUUGGGGUuCUCAUC | 0.1% |
| 9861 | 5047 | UGCAgUUGGGGUCCUCAUC | 1.0% |
| 9862 | 5047 | UGCgAUUGGGGUCCUCAUC | 1.0% |
| 9863 | 5047 | UGCAAUUaGGGUCCUCAUC | 0.1% |
| 9864 | 5047 | UGCAAUUGGaGUCCUCAUC | 0.1% |
| 9865 | 5047 | UGCAAUUGGcGUCCUCAUC | 1.2% |
| 9866 | 5047 | UGCAAUUGGGaUCCUCAUC | 1.1% |
| 9867 | 5047 | UGCAAUUGGGcUCCUCAUC | 0.1% |
| 9868 | 5047 | UGCAgUUGGaGUCCUCAUC | 0.5% |
| 5048 | 5048 | UCAAAAAUGCAAUUGGGGU | 94.4% |
| 9869 | 5048 | UCAAAAAUGCAgUUGGGGU | 1.0% |
| 9870 | 5048 | UCAAAAAUGCgAUUGGGGU | 1.0% |
| 9871 | 5048 | UCAAAgAUGCAAUUGGGGU | 0.1% |
| 9872 | 5048 | UCAAAAAUGCAAUUaGGGU | 0.1% |
| 9873 | 5048 | UCAAAAAUGCAAUUGGaGU | 0.1% |
| 9874 | 5048 | UCAAAAAUGCAAUUGGcGU | 1.2% |
| 9875 | 5048 | UCAAAAAUGCAAUUGGGaU | 1.1% |
| 9876 | 5048 | UCAAAAAUGCAAUUGGGcU | 0.1% |
| 9877 | 5048 | UCAAAAuUGCAAUUGGGGU | 0.5% |
| 9878 | 5048 | UCAAAAAUGCAgUUGGaGU | 0.5% |
| 5049 | 5049 | GUCAAAAAUGCAAUUGGGG | 94.4% |
| 9879 | 5049 | GUCAAAAAUGCAgUUGGGG | 1.0% |
| 9880 | 5049 | GUCAAAAAUGCgAUUGGGG | 1.0% |
| 9881 | 5049 | GUCAAAgAUGCAAUUGGGG | 0.1% |
| 9882 | 5049 | GUCAAAAAUGCAAUUaGGG | 0.1% |
| 9883 | 5049 | GUCAAAAAUGCAAUUGGaG | 0.1% |
| 9884 | 5049 | GUCAAAAAUGCAAUUGGcG | 1.2% |
| 9885 | 5049 | GUCAAAAAUGCAAUUGGGa | 1.1% |
| 9886 | 5049 | GUCAAAAAUGCAAUUGGGc | 0.1% |
| 9887 | 5049 | GUCAAAAuUGCAAUUGGGG | 0.5% |
| 9888 | 5049 | GUCAAAAAUGCAgUUGGaG | 0.5% |
| 5050 | 5050 | AAAAAUGCAAUUGGGGUCC | 94.3% |
| 9889 | 5050 | AAAAAUGCAAUUGGGGUuC | 0.1% |
| 9890 | 5050 | AAAAAUGCAgUUGGGGUCC | 1.0% |
| 9891 | 5050 | AAAAAUGCgAUUGGGGUCC | 1.0% |
| 9892 | 5050 | AAAgAUGCAAUUGGGGUCC | 0.1% |
| 9893 | 5050 | AAAAAUGCAAUUaGGGUCC | 0.1% |
| 9894 | 5050 | AAAAAUGCAAUUGGaGUCC | 0.1% |
| 9895 | 5050 | AAAAAUGCAAUUGGcGUCC | 1.2% |
| 9896 | 5050 | AAAAAUGCAAUUGGGaUCC | 1.1% |
| 9897 | 5050 | AAAAAUGCAAUUGGGcUCC | 0.1% |
| 9898 | 5050 | AAAAuUGCAAUUGGGGUCC | 0.5% |
| 9899 | 5050 | AAAAAUGCAgUUGGaGUCC | 0.5% |
| 5051 | 5051 | AAAAUGCAAUUGGGGUCCU | 94.3% |
| 9900 | 5051 | AAAAUGCAAUUGGGGUuCU | 0.1% |
| 9901 | 5051 | AAAAUGCAgUUGGGGUCCU | 1.0% |
| 9902 | 5051 | AAAAUGCgAUUGGGGUCCU | 1.0% |
| 9903 | 5051 | AAgAUGCAAUUGGGGUCCU | 0.1% |
| 9904 | 5051 | AAAAUGCAAUUaGGGUCCU | 0.1% |
| 9905 | 5051 | AAAAUGCAAUUGGaGUCCU | 0.1% |
| 9906 | 5051 | AAAAUGCAAUUGGcGUCCU | 1.2% |
| 9907 | 5051 | AAAAUGCAAUUGGGaUCCU | 1.1% |
| 9908 | 5051 | AAAAUGCAAUUGGGcUCCU | 0.1% |
| 9909 | 5051 | AAAuUGCAAUUGGGGUCCU | 0.5% |
| 9910 | 5051 | AAAAUGCAgUUGGaGUCCU | 0.5% |
| 5052 | 5052 | AUGCAAUUGGGGUCCUCAU | 94.3% |
| 9911 | 5052 | AUGCAAUUGGGGUCCUCgU | 0.1% |
| 9912 | 5052 | AUGCAAUUGGGGUuCUCAU | 0.1% |
| 9913 | 5052 | AUGCAgUUGGGGUCCUCAU | 1.0% |
| 9914 | 5052 | AUGCgAUUGGGGUCCUCAU | 1.0% |
| 9915 | 5052 | AUGCAAUUaGGGUCCUCAU | 0.1% |
| 9916 | 5052 | AUGCAAUUGGaGUCCUCAU | 0.1% |
| 9917 | 5052 | AUGCAAUUGGcGUCCUCAU | 1.2% |
| 9918 | 5052 | AUGCAAUUGGGaUCCUCAU | 1.1% |
| 9919 | 5052 | AUGCAAUUGGGcUCCUCAU | 0.1% |
| 9920 | 5052 | uUGCAAUUGGGGUCCUCAU | 0.5% |
| 9921 | 5052 | AUGCAgUUGGaGUCCUCAU | 0.5% |
| 5053 | 5053 | CAAAAAUGCAAUUGGGGUC | 94.3% |
| 9922 | 5053 | CAAAAAUGCAAUUGGGGUu | 0.1% |
| 9923 | 5053 | CAAAAAUGCAgUUGGGGUC | 1.0% |
| 9924 | 5053 | CAAAAAUGCgAUUGGGGUC | 1.0% |
| 9925 | 5053 | CAAAgAUGCAAUUGGGGUC | 0.1% |
| 9926 | 5053 | CAAAAAUGCAAUUaGGGUC | 0.1% |
| 9927 | 5053 | CAAAAAUGCAAUUGGaGUC | 0.1% |
| 9928 | 5053 | CAAAAAUGCAAUUGGcGUC | 1.2% |
| 9929 | 5053 | CAAAAAUGCAAUUGGGaUC | 1.1% |
| 9930 | 5053 | CAAAAAUGCAAUUGGGcUC | 0.1% |
| 9931 | 5053 | CAAAAuUGCAAUUGGGGUC | 0.5% |
| 9932 | 5053 | CAAAAAUGCAgUUGGaGUC | 0.5% |
| 5054 | 5054 | AAAUGCAAUUGGGGUCCUC | 94.3% |
| 9933 | 5054 | AAAUGCAAUUGGGGUuCUC | 0.1% |
| 9934 | 5054 | AAAUGCAgUUGGGGUCCUC | 1.0% |
| 9935 | 5054 | AAAUGCgAUUGGGGUCCUC | 1.0% |
| 9936 | 5054 | AgAUGCAAUUGGGGUCCUC | 0.1% |
| 9937 | 5054 | AAAUGCAAUUaGGGUCCUC | 0.1% |
| 9938 | 5054 | AAAUGCAAUUGGaGUCCUC | 0.1% |
| 9939 | 5054 | AAAUGCAAUUGGcGUCCUC | 1.2% |
| 9940 | 5054 | AAAUGCAAUUGGGaUCCUC | 1.1% |
| 9941 | 5054 | AAAUGCAAUUGGGcUCCUC | 0.1% |
| 9942 | 5054 | AAuUGCAAUUGGGGUCCUC | 0.5% |
| 9943 | 5054 | AAAUGCAgUUGGaGUCCUC | 0.5% |
| 5055 | 5055 | AAUGCAAUUGGGGUCCUCA | 94.2% |
| 9944 | 5055 | AAUGCAAUUGGGGUCCUCg | 0.1% |
| 9945 | 5055 | AAUGCAAUUGGGGUuCUCA | 0.1% |
| 9946 | 5055 | AAUGCAgUUGGGGUCCUCA | 1.0% |
| 9947 | 5055 | AAUGCgAUUGGGGUCCUCA | 1.0% |
| 9948 | 5055 | gAUGCAAUUGGGGUCCUCA | 0.1% |
| 9949 | 5055 | AAUGCAAUUaGGGUCCUCA | 0.1% |
| 9950 | 5055 | AAUGCAAUUGGaGUCCUCA | 0.1% |
| 9951 | 5055 | AAUGCAAUUGGcGUCCUCA | 1.2% |
| 9952 | 5055 | AAUGCAAUUGGGaUCCUCA | 1.1% |
| 9953 | 5055 | AAUGCAAUUGGGcUCCUCA | 0.1% |
| 9954 | 5055 | AuUGCAAUUGGGGUCCUCA | 0.5% |
| 9955 | 5055 | AAUGCAgUUGGaGUCCUCA | 0.5% |
| 5056 | 5056 | UGAAAGCGAAUUUCAGUGU | 93.8% |
| 9956 | 5056 | UGAAgGCGAAUUUCAGUGU | 0.1% |
| 9957 | 5056 | UGAgAGCGAAUUUCAGUGU | 0.1% |
| 9958 | 5056 | UaAAAGCGAAUUUCAGUGU | 0.2% |
| 9959 | 5056 | UGAAAGCaAAUUUCAGUGU | 0.3% |
| 9960 | 5056 | UGAAAGCGAAcUUCAGUGU | 1.3% |
| 9961 | 5056 | UGAAAGCGAAUaUCAGUGU | 0.1% |
| 9962 | 5056 | UGAAAGCGAAUUUCAGcGU | 0.2% |
| 9963 | 5056 | UGAAAGCuAAUUUCAGUGU | 0.4% |
| 9964 | 5056 | UuAAAGCGAAUUUCAGUGU | 0.1% |
| 9965 | 5056 | UaAAAGCGAAcUUCAGUGU | 0.3% |
| 9966 | 5056 | UGAAAGCaAAcUUCAGUGU | 0.9% |
| 9967 | 5056 | UGAAAGCaAAcUUuAGUGU | 2.2% |
| 5057 | 5057 | UUGAUCGGCUUCGCCGAGA | 93.7% |
| 9968 | 5057 | UUGAUCGGCUUCCCCGgGA | 0.3% |
| 9969 | 5057 | UcGAUCGGCUUCGCCGAGA | 0.1% |
| 9970 | 5057 | UUGAcCGGCUUCGCCGAGA | 3.1% |
| 9971 | 5057 | UUGAUaGGCUUCGCCGAGA | 0.1% |
| 9972 | 5057 | UUGAUCGaCUUCGCCGAGA | 0.8% |
| 9973 | 5057 | UUGAUCGGaUUCGCCGAGA | 0.1% |
| 9974 | 5057 | UUGAUCGGCUcCGCCGAGA | 0.7% |
| 9975 | 5057 | UUGAUCGGCUUCaCCGAGA | 0.1% |
| 9976 | 5057 | UUGAUCGGCUUCGCaGAGA | 0.1% |
| 9977 | 5057 | UUGAUCGGCUUCGCCGAuA | 0.2% |
| 9978 | 5057 | UUGAUaGaCUUCGCCGAGA | 0.1% |
| 9979 | 5057 | UUGAUCGaCUUCGCaGAGA | 0.1% |
| 9980 | 5057 | UUGAUCGGCUUCGCCGAnn | 0.1% |
| 9981 | 5057 | UaGAcCGGCUUCGCCGgGA | 0.2% |
| 9982 | 5057 | UUGAcCGGgUUuGCCGAGA | 0.1% |
| 5058 | 5058 | CUUGAUCGGCUUCGCCGAG | 93.6% |
| 9983 | 5058 | CUUGAUCGGCUUCGCCGgG | 0.3% |
| 9984 | 5058 | aUUGAUCGGCUUCGCCGAG | 0.1% |
| 9985 | 5058 | CUcGAUCGGCUUCGCCGAG | 0.1% |
| 9986 | 5058 | CUUGAcCGGCUUCGCCGAG | 3.1% |
| 9987 | 5058 | CUUGAUaGGCUUCGCCGAG | 0.1% |
| 9988 | 5058 | CUUGAUCGaCUUCGCCGAG | 0.8% |
| 9989 | 5058 | CUUGAUCGGaUUCGCCGAG | 0.1% |
| 9990 | 5058 | CUUGAUCGGCUcCGCCGAG | 0.7% |
| 9991 | 5058 | CUUGAUCGGCUUCaCCGAG | 0.1% |
| 9992 | 5058 | CUUGAUCGGCUUCGCaGAG | 0.1% |
| 9993 | 5058 | CUUGAUCGGCUUCGCCGAn | 0.1% |
| 9994 | 5058 | CUUGAUCGGCUUCGCCGAU | 0.2% |
| 9995 | 5058 | CUUGAUaGaCUUCGCCGAG | 0.1% |
| 9996 | 5058 | CUUGAUCGaCUUCGCaGAG | 0.1% |
| 9997 | 5058 | CUaGAcCGGCUUCGCCGgG | 0.2% |
| 9998 | 5058 | CUUGAcCGGgUUuGCCGAG | 0.1% |
| 5059 | 5059 | GAAAGCGAAUUUCAGUGUG | 93.6% |
| 9999 | 5059 | GAAgGCGAAUUUCAGUGUG | 0.1% |
| 10000 | 5059 | GAgAGCGAAUUUCAGUGUG | 0.1% |
| 10001 | 5059 | aAAAGCGAAUUUCAGUGUG | 0.2% |
| 10002 | 5059 | GAAAGCaAAUUUCAGUGUG | 0.3% |
| 10003 | 5059 | GAAAGCGAAcUUCAGUGUG | 1.3% |
| 10004 | 5059 | GAAAGCGAAUaUCAGUGUG | 0.1% |
| 10005 | 5059 | GAAAGCGAAUUUCAGcGUG | 0.2% |
| 10006 | 5059 | GAAAGCGAAUUUCAGUGUa | 0.2% |
| 10007 | 5059 | GAAAGCuAAUUUCAGUGUG | 0.4% |
| 10008 | 5059 | uAAAGCGAAUUUCAGUGUG | 0.1% |
| 10009 | 5059 | aAAAGCGAAcUUCAGUGUG | 0.3% |
| 10010 | 5059 | GAAAGCaAAcUUCAGUGUG | 0.9% |
| 10011 | 5059 | GAAAGCaAAcUUuAGUGUG | 2.2% |
| 5060 | 5060 | AUCGGCUUCGCCGAGAUCA | 93.4% |
| 10012 | 5060 | AUCGGCUUCGCCGgGAUCA | 0.3% |
| 10013 | 5060 | AcCGGCUUCGCCGAGAUCA | 3.1% |
| 10014 | 5060 | AUaGGCUUCGCCGAGAUCA | 0.1% |
| 10015 | 5060 | AUCGaCUUCGCCGAGAUCA | 0.8% |
| 10016 | 5060 | AUCGGaUUCGCCGAGAUCA | 0.1% |
| 10017 | 5060 | AUCGGCUcCGCCGAGAUCA | 0.6% |
| 10018 | 5060 | AUCGGCUUCaCCGAGAUCA | 0.1% |
| 10019 | 5060 | AUCGGCUUCGCaGAGAUCA | 0.1% |
| 10020 | 5060 | AUCGGCUUCGCCGAGAcCA | 0.3% |
| 10021 | 5060 | AUCGGCUUCGCCGAGAUaA | 0.1% |
| 10022 | 5060 | AUCGGCUUCGCCGAuAUCA | 0.2% |
| 10023 | 5060 | AcCGGCUUCGCCGgGAUCA | 0.2% |
| 10024 | 5060 | AUaGaCUUCGCCGAGAUCA | 0.1% |
| 10025 | 5060 | AUCGaCUUCGCaGAGAUCA | 0.1% |
| 10026 | 5060 | AUCGGCUcCGCCGAGAUCu | 0.1% |
| 10027 | 5060 | AUCGGCUUCGCCGAnnUCA | 0.1% |
| 10028 | 5060 | ACCGGgUUuGCCGAGAUCA | 0.1% |
| 5061 | 5061 | GAUCGGCUUCGCCGAGAUC | 93.4% |
| 10029 | 5061 | GAUCGGCUUCGCCGgGAUC | 0.3% |
| 10030 | 5061 | GAcCGGCUUCGCCGAGAUC | 3.1% |
| 10031 | 5061 | GAUaGGCUUCGCCGAGAUC | 0.1% |
| 10032 | 5061 | GAUCGaCUUCGCCGAGAUC | 0.8% |
| 10033 | 5061 | GAUCGGaUUCGCCGAGAUC | 0.1% |
| 10034 | 5061 | GAUCGGCUcCGCCGAGAUC | 0.7% |
| 10035 | 5061 | GAUCGGCUUCaCCGAGAUC | 0.1% |
| 10036 | 5061 | GAUCGGCUUCGCaGAGAUC | 0.1% |
| 10037 | 5061 | GAUCGGCUUCGCCGAGAcC | 0.3% |
| 10038 | 5061 | GAUCGGCUUCGCCGAGAUa | 0.1% |
| 10039 | 5061 | GAUCGGCUUCGCCGAuAUC | 0.2% |
| 10040 | 5061 | GAcCGGCUUCGCCGgGAUC | 0.2% |
| 10041 | 5061 | GAUaGaCUUCGCCGAGAUC | 0.1% |
| 10042 | 5061 | GAUCGaCUUCGCaGAGAUC | 0.1% |
| 10043 | 5061 | GAUCGGCUUCGCCGAnnUC | 0.1% |
| 10044 | 5061 | GAcCGGgUUuGCCGAGAUC | 0.1% |
| 5062 | 5062 | UGAUCGGCUUCGCCGAGAU | 93.4% |
| 10045 | 5062 | UGAUCGGCUUCGCCGgGAU | 0.3% |
| 10046 | 5062 | cGAUCGGCUUCGCCGAGAU | 0.1% |
| 10047 | 5062 | UGAcCGGCUUCGCCGAGAU | 3.1% |
| 10048 | 5062 | UGAUaGGCUUCGCCGAGAU | 0.1% |
| 10049 | 5062 | UGAUCGaCUUCGCCGAGAU | 0.8% |
| 10050 | 5062 | UGAUCGGaUUCGCCGAGAU | 0.1% |
| 10051 | 5062 | UGAUCGGCUcCGCCGAGAU | 0.7% |
| 10052 | 5062 | UGAUCGGCUUCaCCGAGAU | 0.1% |
| 10053 | 5062 | UGAUCGGCUUCGCaGAGAU | 0.1% |
| 10054 | 5062 | UGAUCGGCUUCGCCGAGAc | 0.3% |
| 10055 | 5062 | UGAUCGGCUUCGCCGAuAU | 0.2% |
| 10056 | 5062 | UGAUaGaCUUCGCCGAGAU | 0.1% |
| 10057 | 5062 | UGAUCGaCUUCGCaGAGAU | 0.1% |
| 10058 | 5062 | UGAUCGGCUUCGCCGAnnU | 0.1% |
| 10059 | 5062 | aGAcCGGCUUCGCCGgGAU | 0.2% |
| 10060 | 5062 | UGAcCGGgUUuGCCGAGAU | 0.1% |
| 5063 | 5063 | UCGGCUUCGCCGAGAUCAG | 93.2% |
| 10061 | 5063 | UCGGCUUCGCCGgGAUCAG | 0.3% |
| 10062 | 5063 | cCGGCUUCGCCGAGAUCAG | 2.9% |
| 10063 | 5063 | UaGGCUUCGCCGAGAUCAG | 0.1% |
| 10064 | 5063 | UCGaCUUCGCCGAGAUCAG | 0.8% |
| 10065 | 5063 | UCGGaUUCGCCGAGAUCAG | 0.1% |
| 10066 | 5063 | UCGGCUcCGCCGAGAUCAG | 0.3% |
| 10067 | 5063 | UCGGCUUCaCCGAGAUCAG | 0.1% |
| 10068 | 5063 | UCGGCUUCGCaGAGAUCAG | 0.1% |
| 10069 | 5063 | UCGGCUUCGCCGAGAcCAG | 0.3% |
| 10070 | 5063 | UCGGCUUCGCCGAGAUaAG | 0.1% |
| 10071 | 5063 | UCGGCUUCGCCGAGAUCAa | 0.2% |
| 10072 | 5063 | UCGGCUUCGCCGAuAUCAG | 0.2% |
| 10073 | 5063 | cCGGCUUCGCCGgGAUCAG | 0.2% |
| 10074 | 5063 | cCGGCUUCGCCGAGAUCAa | 0.2% |
| 10075 | 5063 | UaGaCUUCGCCGAGAUCAG | 0.1% |
| 10076 | 5063 | UCGaCUUCGCaGAGAUCAG | 0.1% |
| 10077 | 5063 | UCGGCUcCGCCGAGAUCAa | 0.3% |
| 10078 | 5063 | UCGGCUUCGCCGAnnUCAG | 0.1% |
| 10079 | 5063 | cCGGgUUuGCCGAGAUCAG | 0.1% |
| 5064 | 5064 | GAGCAAUUGUUGGCGAAAU | 92.8% |
| 10080 | 5064 | GAGCAAUUGUUGGuGAAAU | 0.1% |
| 10081 | 5064 | GAGCAgUUGUUGGCGAAAU | 0.2% |
| 10082 | 5064 | GAGuAAUUGUUGGCGAAAU | 0.7% |
| 10083 | 5064 | GgGCAAUUGUUGGCGAAAU | 0.7% |
| 10084 | 5064 | GgGCAAUUGUUGGCGAgAU | 0.1% |
| 10085 | 5064 | aAGCAAUUGUUGGCGAAAU | 0.1% |
| 10086 | 5064 | GAaCAAUUGUUGGCGAAAU | 0.3% |
| 10087 | 5064 | GAGCAAUUaUUGGCGAAAU | 0.1% |
| 10088 | 5064 | GAGCAAUUGUaGGCGAAAU | 0.1% |
| 10089 | 5064 | GAGCAAUUGUgGGCGAAAU | 0.1% |
| 10090 | 5064 | GAGCAAUUGUUGCCGAAAU | 0.1% |
| 10091 | 5064 | GcGCAAUUGUUGGCGAAAU | 0.6% |
| 10092 | 5064 | GAaCAAUUGUUGGuGAAAU | 0.1% |
| 10093 | 5064 | GgaCAAUUGUUGGCGAAAU | 0.2% |
| 10094 | 5064 | GgGCAAUUGUaGGCGAAAU | 0.1% |
| 10095 | 5064 | GAcgAAUUGUUGGCGAAAU | 0.1% |
| 10096 | 5064 | GAGCAAUaGUgGGCGAAAU | 1.6% |
| 10097 | 5064 | GAGCAAUcGUUGGaGAAAU | 0.3% |
| 10098 | 5064 | GAGCAAUcGUUGGaGAgAU | 0.1% |
| 5065 | 5065 | GGAGCAAUUGUUGGCGAAA | 92.8% |
| 10099 | 5065 | GGAGCAAUUGUUGGuGAAA | 0.1% |
| 10100 | 5065 | GGAGCAgUUGUUGGCGAAA | 0.2% |
| 10101 | 5065 | GGAGuAAUUGUUGGCGAAA | 0.7% |
| 10102 | 5065 | GGgGCAAUUGUUGGCGAAA | 0.7% |
| 10103 | 5065 | GGgGCAAUUGUUGGCGAgA | 0.1% |
| 10104 | 5065 | GaAGCAAUUGUUGGCGAAA | 0.1% |
| 10105 | 5065 | GGAaCAAUUGUUGGCGAAA | 0.3% |
| 10106 | 5065 | GGAGCAAUUaUUGGCGAAA | 0.1% |
| 10107 | 5065 | GGAGCAAUUGUaGGCGAAA | 0.1% |
| 10108 | 5065 | GGAGCAAUUGUgGGCGAAA | 0.1% |
| 10109 | 5065 | GGAGCAAUUGUUGcCGAAA | 0.1% |
| 10110 | 5065 | GGcGCAAUUGUUGGCGAAA | 0.6% |
| 10111 | 5065 | GGAaCAAUUGUUGGuGAAA | 0.1% |
| 10112 | 5065 | GGgaCAAUUGUUGGCGAAA | 0.2% |
| 10113 | 5065 | GGgGCAAUUGUaGGCGAAA | 0.1% |
| 10114 | 5065 | GGAcgAAUUGUUGGCGAAA | 0.1% |
| 10115 | 5065 | GGAGCAAUaGUgGGCGAAA | 1.6% |
| 10116 | 5065 | GGAGCAAUcGUUGGaGAAA | 0.3% |
| 10117 | 5065 | GGAGCAAUcGUUGGaGAgA | 0.1% |
| 5066 | 5066 | UUCCUUGAUCGGCUUCGCC | 92.7% |
| 10118 | 5066 | UUuCUUGAUCGGCUUCGCC | 1.5% |
| 10119 | 5066 | UUCaUUGAUCGGCUUCGCC | 0.1% |
| 10120 | 5066 | UUCCUUGAcCGGCUUCGCC | 3.1% |
| 10121 | 5066 | UUCCUUGAUaGGCUUCGCC | 0.1% |
| 10122 | 5066 | UUCCUUGAUCGaCUUCGCC | 0.8% |
| 10123 | 5066 | UUCCUUGAUCGGaUUCGCC | 0.1% |
| 10124 | 5066 | UUCCUUGAUCGGCUcCGCC | 0.7% |
| 10125 | 5066 | UUCCUUGAUCGGCUUCaCC | 0.1% |
| 10126 | 5066 | UUCCUUGAUCGGCUUCGCa | 0.1% |
| 10127 | 5066 | UUuCUcGAUCGGCUUCGCC | 0.1% |
| 10128 | 5066 | UUCCUUGAUaGaCUUCGCC | 0.1% |
| 10129 | 5066 | UUCCUUGAcCGGgUUUGCC | 0.1% |
| 10130 | 5066 | UUuCUaGAcCGGCUUCGCC | 0.2% |
| 5067 | 5067 | UCCUUGAUCGGCUUCGCCG | 92.7% |
| 10131 | 5067 | UuCUUGAUCGGCUUCGCCG | 1.5% |
| 10132 | 5067 | UCaUUGAUCGGCUUCGCCG | 0.1% |
| 10133 | 5067 | UCCUUGAcCGGCUUCGCCG | 3.1% |
| 10134 | 5067 | UCCUUGAUaGGCUUCGCCG | 0.1% |
| 10135 | 5067 | UCCUUGAUCGaCUUCGCCG | 0.8% |
| 10136 | 5067 | UCCUUGAUCGGaUUCGCCG | 0.1% |
| 10137 | 5067 | UCCUUGAUCGGCUcCGCCG | 0.7% |
| 10138 | 5067 | UCCUUGAUCGGCUUCaCCG | 0.1% |
| 10139 | 5067 | UCCUUGAUCGGCUUCGCaG | 0.1% |
| 10140 | 5067 | UuCUcGAUCGGCUUCGCCG | 0.1% |
| 10141 | 5067 | UCCUUGAUaGaCUUCGCCG | 0.1% |
| 10142 | 5067 | UCCUUGAcCGGgUUuGCCG | 0.1% |
| 10143 | 5067 | UuCUaGAcCGGCUUCGCCG | 0.2% |
| 5068 | 5068 | GGGAGCAAUUGUUGGCGAA | 92.7% |
| 10144 | 5068 | GGGAGCAAUUGUUGGuGAA | 0.1% |
| 10145 | 5068 | GGGAGCAgUUGUUGGCGAA | 0.2% |
| 10146 | 5068 | GGGAGuAAUUGUUGGCGAA | 0.7% |
| 10147 | 5068 | GGGgGCAAUUGUUGGCGAA | 0.7% |
| 10148 | 5068 | GGGgGCAAUUGUUGGCGAg | 0.1% |
| 10149 | 5068 | aGGAGCAAUUGUUGGCGAA | 0.1% |
| 10150 | 5068 | GGaAGCAAUUGUUGGCGAA | 0.1% |
| 10151 | 5068 | GGGAaCAAUUGUUGGCGAA | 0.3% |
| 10152 | 5068 | GGGAGCAAUUaUUGGCGAA | 0.1% |
| 10153 | 5068 | GGGAGCAAUUGUaGGCGAA | 0.1% |
| 10154 | 5068 | GGGAGCAAUUGUUGcCGAA | 0.1% |
| 10155 | 5068 | GGGcGCAAUUGUUGGCGAA | 0.6% |
| 10156 | 5068 | GGGAaCAAUUGUUGGuGAA | 0.1% |
| 10157 | 5068 | GGGgaCAAUUGUUGGCGAA | 0.2% |
| 10158 | 5068 | aGGAGCAAUUGUgGGCGAA | 0.1% |
| 10159 | 5068 | GGGAcgAAUUGUUGGCGAA | 0.1% |
| 10160 | 5068 | GGGAGCAAUcGUUGGaGAA | 0.3% |
| 10161 | 5068 | aGGgGCAAUUGUaGGCGAA | 0.1% |
| 10162 | 5068 | GGGAGCAAUcGUUGGaGAg | 0.1% |
| 5069 | 5069 | AGGGAGCAAUUGUUGGCGA | 92.5% |
| 10163 | 5069 | AGGGAGCAAUUGUUGGuGA | 0.1% |
| 10164 | 5069 | AGGGAGCAgUUGUUGGCGA | 0.2% |
| 10165 | 5069 | AGGGAGuAAUUGUUGGCGA | 0.7% |
| 10166 | 5069 | AGGGgGCAAUUGUUGGCGA | 0.8% |
| 10167 | 5069 | AaGGAGCAAUUGUUGGCGA | 0.1% |
| 10168 | 5069 | AGGaAGCAAUUGUUGGCGA | 0.1% |
| 10169 | 5069 | AGGGAaCAAUUGUUGGCGA | 0.3% |
| 10170 | 5069 | AGGGAGCAAUUaUUGGCGA | 0.1% |
| 10171 | 5069 | AGGGAGCAAUUGUaGGCGA | 0.1% |
| 10172 | 5069 | AGGGAGCAAUUGUUGcCGA | 0.1% |
| 10173 | 5069 | AGGGcGCAAUUGUUGGCGA | 0.6% |
| 10174 | 5069 | cGGGAGCAAUUGUUGGCGA | 0.2% |
| 10175 | 5069 | AGGGAaCAAUUGUUGGuGA | 0.1% |
| 10176 | 5069 | AGGGgaCAAUUGUUGGCGA | 0.2% |
| 10177 | 5069 | AaGGAGCAAUUGUgGGCGA | 0.1% |
| 10178 | 5069 | AGGGAcgAAUUGUUGGCGA | 0.1% |
| 10179 | 5069 | AGGGAGCAAUcGUUGGaGA | 0.4% |
| 10180 | 5069 | AaGGgGCAAUUGUaGGCGA | 0.1% |
| 5070 | 5070 | CCUUGAUCGGCUUCGCCGA | 92.4% |
| 10181 | 5070 | CCUUGAUCGGCUUCGCCGg | 0.3% |
| 10182 | 5070 | uCUUGAUCGGCUUCGCCGA | 1.5% |
| 10183 | 5070 | CaUUGAUCGGCUUCGCCGA | 0.1% |
| 10184 | 5070 | CCUUGAcCGGCUUCGCCGA | 3.1% |
| 10185 | 5070 | CCUUGAUaGGCUUCGCCGA | 0.1% |
| 10186 | 5070 | CCUUGAUCGaCUUCGCCGA | 0.8% |
| 10187 | 5070 | CCUUGAUCGGaUUCGCCGA | 0.1% |
| 10188 | 5070 | CCUUGAUCGGCUcCGCCGA | 0.7% |
| 10189 | 5070 | CCUUGAUCGGCUUCaCCGA | 0.1% |
| 10190 | 5070 | CCUUGAUCGGCUUCGCaGA | 0.1% |
| 10191 | 5070 | uCUcGAUCGGCUUCGCCGA | 0.1% |
| 10192 | 5070 | CCUUGAUaGaCUUCGCCGA | 0.1% |
| 10193 | 5070 | CCUUGAUCGaCUUCGCaGA | 0.1% |
| 10194 | 5070 | CCUUGAcCGGgUUuGCCGA | 0.1% |
| 5071 | 5071 | GAGGGAGCAAUUGUUGGCG | 92.3% |
| 10195 | 5071 | GAGGGAGCAAUUGUUGGuG | 0.1% |
| 10196 | 5071 | GAGGGAGCAgUUGUUGGCG | 0.2% |
| 10197 | 5071 | GAGGGAGuAAUUGUUGGCG | 0.7% |
| 10198 | 5071 | GAGGGgGCAAUUGUUGGCG | 0.8% |
| 10199 | 5071 | aAGGGAGCAAUUGUUGGCG | 0.2% |
| 10200 | 5071 | GAaGGAGCAAUUGUUGGCG | 0.1% |
| 10201 | 5071 | GAGGaAGCAAUUGUUGGCG | 0.1% |
| 10202 | 5071 | GAGGGAaCAAUUGUUGGCG | 0.3% |
| 10203 | 5071 | GAGGGAGCAAUUaUUGGCG | 0.1% |
| 10204 | 5071 | GAGGGAGCAAUUGUaGGCG | 0.1% |
| 10205 | 5071 | GAGGGAGCAAUUGUUGcCG | 0.1% |
| 10206 | 5071 | GAGGGcGCAAUUGUUGGCG | 0.6% |
| 10207 | 5071 | GcGGGAGCAAUUGUUGGCG | 0.2% |
| 10208 | 5071 | GAGGGAaCAAUUGUUGGuG | 0.1% |
| 10209 | 5071 | GAGGGgaCAAUUGUUGGCG | 0.2% |
| 10210 | 5071 | GAaGGAGCAAUUGUgGGCG | 0.1% |
| 10211 | 5071 | GAGGGAcgAAUUGUUGGCG | 0.1% |
| 10212 | 5071 | GAGGGAGCAAUcGUUGGaG | 0.4% |
| 10213 | 5071 | GAaGGgGCAAUUGUaGGCG | 0.1% |
| 5072 | 5072 | AGGGCUUUCACCGAAGAGG | 92.3% |
| 10214 | 5072 | AGGGCUUUCACCGAgGAGG | 0.1% |
| 10215 | 5072 | AGGGCUUUCACuGAAGAGG | 0.3% |
| 10216 | 5072 | AGGGCUUUCAuCGAAGAGG | 0.1% |
| 10217 | 5072 | AGGGCUUUuACCGAAGAGG | 0.1% |
| 10218 | 5072 | AGGGCUUUCACuGAgGAGG | 0.1% |
| 10219 | 5072 | AGaGCUUUCACCGAAGAGG | 0.1% |
| 10220 | 5072 | AGGGCcUUCACCGAAGAGG | 0.7% |
| 10221 | 5072 | AGGGCUaUCACCGAAGAGG | 0.1% |
| 10222 | 5072 | AGGGCUUUCACaGAAGAGG | 0.1% |
| 10223 | 5072 | AGGGCUUUCACCaAAGAGG | 0.1% |
| 10224 | 5072 | AGGGCUUUCACCGAAaAGG | 0.2% |
| 10225 | 5072 | AGGGCUUUCACCGAAGAaG | 0.1% |
| 10226 | 5072 | AGGGCUUUCACCGAAGcGG | 0.2% |
| 10227 | 5072 | AGGGgUUUCACCGAAGAGG | 0.1% |
| 10228 | 5072 | AGGGCcUUCACCGAgGAGG | 2.0% |
| 5073 | 5073 | GGGCUUUCACCGAAGAGGG | 92.2% |
| 10229 | 5073 | GGGCUUUCACCGAgGAGGG | 0.1% |
| 10230 | 5073 | GGGCUUUCACuGAAGAGGG | 0.3% |
| 10231 | 5073 | GGGCUUUCAuCGAAGAGGG | 0.1% |
| 10232 | 5073 | GGGCUUUuACCGAAGAGGG | 0.1% |
| 10233 | 5073 | GGGCUUUCACuGAgGAGGG | 0.1% |
| 10234 | 5073 | GaGCUUUCACCGAAGAGGG | 0.1% |
| 10235 | 5073 | GGGCcUUCACCGAAGAGGG | 0.7% |
| 10236 | 5073 | GGGCUaUCACCGAAGAGGG | 0.1% |
| 10237 | 5073 | GGGCUUUCACaGAAGAGGG | 0.1% |
| 10238 | 5073 | GGGCUUUCACCaAAGAGGG | 0.1% |
| 10239 | 5073 | GGGCUUUCACCGAAaAGGG | 0.2% |
| 10240 | 5073 | GGGCUUUCACCGAAGAaGG | 0.1% |
| 10241 | 5073 | GGGCUUUCACCGAAGAGGa | 0.1% |
| 10242 | 5073 | GGGCUUUCACCGAAGcGGG | 0.2% |
| 10243 | 5073 | GGGgUUUCACCGAAGAGGG | 0.1% |
| 10244 | 5073 | GGGCcUUCACCGAgGAGGG | 2.0% |
| 5074 | 5074 | AUAAGAUGGCUGAUUGAAG | 92.1% |
| 10245 | 5074 | AUAAGAUGGCUGAUUGAgG | 0.1% |
| 10246 | 5074 | AUAAGAUGGuUGAUUGAAG | 1.6% |
| 10247 | 5074 | AUAAGgUGGCUGAUUGAAG | 1.8% |
| 10248 | 5074 | AUgAGAUGGCUGAUUGAAG | 0.1% |
| 10249 | 5074 | AUAAGgUGGCUGAUUGAgG | 0.1% |
| 10250 | 5074 | AUAAGAUGGCUaAUUGAAG | 1.8% |
| 10251 | 5074 | AUAAGAUGGCUGAUcGAAG | 0.3% |
| 10252 | 5074 | AUAAnAUGGCUGAUUGAAG | 0.1% |
| 10253 | 5074 | AUAAGAUGGuUaAUUGAAG | 2.0% |
| 10254 | 5074 | AUAAGgUGGuUaAUUGAAG | 0.1% |
| 5075 | 5075 | UAAGAUGGCUGAUUGAAGA | 92.1% |
| 10255 | 5075 | UAAGAUGGCUGAUUGAgGA | 0.1% |
| 10256 | 5075 | UAAGAUGGuUGAUUGAAGA | 1.6% |
| 10257 | 5075 | UAAGgUGGCUGAUUGAAGA | 1.8% |
| 10258 | 5075 | UgAGAUGGCUGAUUGAAGA | 0.1% |
| 10259 | 5075 | UAAGgUGGCUGAUUGAgGA | 0.1% |
| 10260 | 5075 | UAAGAUGGCUaAUUGAAGA | 1.8% |
| 10261 | 5075 | UAAGAUGGCUGAUcGAAGA | 0.3% |
| 10262 | 5075 | UAAnAUGGCUGAUUGAAGA | 0.1% |
| 10263 | 5075 | UAAGAUGGuUaAUUGAAGA | 2.0% |
| 10264 | 5075 | UAAGgUGGuUaAUUGAAGA | 0.1% |
| 5076 | 5076 | AAGAUGGCUGAUUGAAGAA | 91.9% |
| 10265 | 5076 | AAGAUGGCUGAUUGAAGAg | 0.2% |
| 10266 | 5076 | AAGAUGGCUGAUUGAgGAA | 0.1% |
| 10267 | 5076 | AAGAUGGuUGAUUGAAGAA | 1.6% |
| 10268 | 5076 | AAGgUGGCUGAUUGAAGAA | 1.8% |
| 10269 | 5076 | gAGAUGGCUGAUUGAAGAA | 0.1% |
| 10270 | 5076 | AAGgUGGCUCAUUGAgGAA | 0.1% |
| 10271 | 5076 | AAGAUGGCUaAUUGAAGAA | 1.8% |
| 10272 | 5076 | AAGAUGGCUGAUcGAAGAA | 0.3% |
| 10273 | 5076 | AAnAUGGCUGAUUGAAGAA | 0.1% |
| 10274 | 5076 | AAGAUGGuUaAUUGAAGAA | 2.0% |
| 10275 | 5076 | AAGgUGGuUaAUUGAAGAA | 0.1% |
| 5077 | 5077 | CUAAGGGCUUUCACCGAAG | 91.9% |
| 10276 | 5077 | CUAAGGGCUUUCACCGAgG | 0.1% |
| 10277 | 5077 | CUAAGGGCUUUCACuGAAG | 0.3% |
| 10278 | 5077 | CUAAGGGCUUUCAuCGAAG | 0.1% |
| 10279 | 5077 | CUAAGGGCUUUuACCGAAG | 0.1% |
| 10280 | 5077 | CUgAGGGCUUUCACCGAAG | 0.4% |
| 10281 | 5077 | uUAAGGGCUUUCACCGAAG | 0.1% |
| 10282 | 5077 | CUAAGGGCUUUCACuGAgG | 0.1% |
| 10283 | 5077 | CaAAGGGCUUUCACCGAAG | 0.1% |
| 10284 | 5077 | CUAAGaGCUUUCACCGAAG | 0.1% |
| 10285 | 5077 | CUAAGGGCcUUCACCGAAG | 0.7% |
| 10286 | 5077 | CUAAGGGCUaUCACCGAAG | 0.1% |
| 10287 | 5077 | CUAAGGGCUUUCACaGAAG | 0.1% |
| 10288 | 5077 | CUAAGGGCUUUCACCaAAG | 0.1% |
| 10289 | 5077 | CUAAGGGCUUUCACCGAAa | 0.2% |
| 10290 | 5077 | CUAAGGGgUUUCACCGAAG | 0.1% |
| 10291 | 5077 | CUuAGGGCUUUCACCGAAG | 0.1% |
| 10292 | 5077 | CUAAGGGCcUUCACCGAgG | 2.0% |
| 5078 | 5078 | AAGGGCUUUCACCGAAGAG | 91.8% |
| 10293 | 5078 | AAGGGCUUUCACCGAgGAG | 0.1% |
| 10294 | 5078 | AAGGGCUUUCACuGAAGAG | 0.3% |
| 10295 | 5078 | AAGGGCUUUCAuCGAAGAG | 0.1% |
| 10296 | 5078 | AAGGGCUUUuACCGAAGAG | 0.1% |
| 10297 | 5078 | gAGGGCUUUCACCGAAGAG | 0.4% |
| 10298 | 5078 | AAGGGCUUUCACuGAgGAG | 0.1% |
| 10299 | 5078 | AAGaGCUUUCACCGAAGAG | 0.1% |
| 10300 | 5078 | AAGGGCcUUCACCGAAGAG | 0.7% |
| 10301 | 5078 | AAGGGCUaUCACCGAAGAG | 0.1% |
| 10302 | 5078 | AAGGGCUUUCACaGAAGAG | 0.1% |
| 10303 | 5078 | AAGGGCUUUCACCaAAGAG | 0.1% |
| 10304 | 5078 | AAGGGCUUUCACCGAAaAG | 0.2% |
| 10305 | 5078 | AAGGGCUUUCACCGAAGAa | 0.1% |
| 10306 | 5078 | AAGGGCUUUCACCGAAGcG | 0.2% |
| 10307 | 5078 | AAGGGgUUUCACCGAAGAG | 0.1% |
| 10308 | 5078 | uAGGGCUUUCACCGAAGAG | 0.1% |
| 10309 | 5078 | AAGGGCcUUCACCGAgGAG | 2.0% |
| 5079 | 5079 | UAAGGGCUUUCACCGAAGA | 91.8% |
| 10310 | 5079 | UAAGGGCUUUCACCGAgGA | 0.1% |
| 10311 | 5079 | UAAGGGCUUUCACuGAAGA | 0.3% |
| 10312 | 5079 | UAAGGGCUUUCAuCGAAGA | 0.1% |
| 10313 | 5079 | UAAGGGCUUUuACCGAAGA | 0.1% |
| 10314 | 5079 | UgAGGGCUUUCACCGAAGA | 0.4% |
| 10315 | 5079 | UAAGGGCUUUCACuGAgGA | 0.1% |
| 10316 | 5079 | aAAGGGCUUUCACCGAAGA | 0.1% |
| 10317 | 5079 | UAAGaGCUUUCACCGAAGA | 0.1% |
| 10318 | 5079 | UAAGGGCcUUCACCGAAGA | 0.7% |
| 10319 | 5079 | UAAGGGCUaUCACCGAAGA | 0.1% |
| 10320 | 5079 | UAAGGGCUUUCACaGAAGA | 0.1% |
| 10321 | 5079 | UAAGGGCUUUCACCaAAGA | 0.1% |
| 10322 | 5079 | UAAGGGCUUUCACCGAAaA | 0.2% |
| 10323 | 5079 | UAAGGGCUUUCACCGAAGc | 0.2% |
| 10324 | 5079 | UAAGGGgUUUCACCGAAGA | 0.1% |
| 10325 | 5079 | UuAGGGCUUUCACCGAAGA | 0.1% |
| 10326 | 5079 | UAAGGGCcUUCACCGAgGA | 2.0% |
| 5080 | 5080 | GAUGGCUGAUUGAAGAAGU | 91.7% |
| 10327 | 5080 | GAUGGCUGAUUGAAGAgGU | 0.2% |
| 10328 | 5080 | GAUGGCUGAUUGAgGAAGU | 0.1% |
| 10329 | 5080 | GAUGGuUGAUUGAAGAAGU | 1.6% |
| 10330 | 5080 | GgUGGCUGAUUGAAGAAGU | 1.8% |
| 10331 | 5080 | GgUGGCUGAUUGAgGAAGU | 0.1% |
| 10332 | 5080 | GAUGGCUaAUUGAAGAAGU | 1.8% |
| 10333 | 5080 | GAUGGCUGAUCGAAGAAGU | 0.3% |
| 10334 | 5080 | GAUGGCUGAUUGAAGAAaU | 0.3% |
| 10335 | 5080 | nAUGGCUGAUUGAAGAAGU | 0.1% |
| 10336 | 5080 | GAUGGuUaAUUGAAGAAGU | 1.9% |
| 10337 | 5080 | GgUGGuUaAUUGAAGAAGU | 0.1% |
| 10338 | 5080 | GAUGGuUaAUUGAAGAAaU | 0.1% |
| 5081 | 5081 | AGAUGGCUGAUUGAAGAAG | 91.7% |
| 10339 | 5081 | AGAUGGCUGAUUGAAGAgG | 0.2% |
| 10340 | 5081 | AGAUGGCUGAUUGAgGAAG | 0.1% |
| 10341 | 5081 | AGAUGGuUGAUUGAAGAAG | 1.6% |
| 10342 | 5081 | AGgUGGCUGAUUGAAGAAG | 1.8% |
| 10343 | 5081 | AGgUGGCUGAUUGAgGAAG | 0.1% |
| 10344 | 5081 | AGAUGGCUaAUUGAAGAAG | 1.8% |
| 10345 | 5081 | AGAUGGCUGAUcGAAGAAG | 0.3% |
| 10346 | 5081 | AGAUGGCUGAUUGAAGAAa | 0.3% |
| 10347 | 5081 | AnAUGGCUGAUUGAAGAAG | 0.1% |
| 10348 | 5081 | AGAUGGuUaAUUGAAGAAG | 1.9% |
| 10349 | 5081 | AGgUGGuUaAUUGAAGAAG | 0.1% |
| 10350 | 5081 | AGAUGGuUaAUUGAAGAAa | 0.1% |
| 5082 | 5082 | ACUAAGGGCUUUCACCGAA | 91.4% |
| 10351 | 5082 | ACUAAGGGCUUUCACuGAA | 0.3% |
| 10352 | 5082 | ACUAAGGGCUUUCAuCGAA | 0.1% |
| 10353 | 5082 | ACUAAGGGCUUUuACCGAA | 0.1% |
| 10354 | 5082 | ACUgAGGGCUUUCACCGAA | 0.4% |
| 10355 | 5082 | AuUAAGGGCUUUCACCGAA | 0.1% |
| 10356 | 5082 | gCUAAGGGCUUUCACCGAA | 0.7% |
| 10357 | 5082 | ACUAAGGGCUUUCACuGAg | 0.1% |
| 10358 | 5082 | gCUAAGGGCUUUCACCGAg | 0.1% |
| 10359 | 5082 | ACaAAGGGCUUUCACCGAA | 0.1% |
| 10360 | 5082 | ACUAAGaGCUUUCACCGAA | 0.1% |
| 10361 | 5082 | ACUAAGGGCcUUCACCGAA | 0.7% |
| 10362 | 5082 | ACUAAGGGCUaUCACCGAA | 0.1% |
| 10363 | 5082 | ACUAAGGGCUUUCACaGAA | 0.1% |
| 10364 | 5082 | ACUAAGGGCUUUCACCaAA | 0.1% |
| 10365 | 5082 | ACUAAGGGgUUUCACCGAA | 0.1% |
| 10366 | 5082 | ACUuAGGGCUUUCACCGAA | 0.1% |
| 10367 | 5082 | ACUAAGGGCcUUCACCGAg | 2.0% |
| 5083 | 5083 | UACUAAGGGCUUUCACCGA | 91.3% |
| 10368 | 5083 | UACUAAGGGCUUUCACuGA | 0.4% |
| 10369 | 5083 | UACUAAGGGCUUUCAuCGA | 0.1% |
| 10370 | 5083 | UACUAAGGGCUUUuACCGA | 0.1% |
| 10371 | 5083 | UACUgAGGGCUUUCACCGA | 0.4% |
| 10372 | 5083 | UAuUAAGGGCUUUCACCGA | 0.1% |
| 10373 | 5083 | UgCUAAGGGCUUUCACCGA | 0.8% |
| 10374 | 5083 | cACUAAGGGCUUUCACCGA | 0.1% |
| 10375 | 5083 | UACaAAGGGCUUUCACCGA | 0.1% |
| 10376 | 5083 | UACUAAGaGCUUUCACCGA | 0.1% |
| 10377 | 5083 | UACUAAGGGCcUUCACCGA | 2.7% |
| 10378 | 5083 | UACUAAGGGCUaUCACCGA | 0.1% |
| 10379 | 5083 | UACUAAGGGCUUUCACaGA | 0.1% |
| 10380 | 5083 | UACUAAGGGCUUUCACCaA | 0.1% |
| 10381 | 5083 | UACUAAGGGgUUUCACCGA | 0.1% |
| 10382 | 5083 | UACUuAGGGCUUUCACCGA | 0.1% |
| 5084 | 5084 | AAAGCGAAUUUCAGUGUGA | 91.2% |
| 10383 | 5084 | AAAGCGAAUUUCAGUGUGg | 2.8% |
| 10384 | 5084 | AAgGCGAAUUUCAGUGUGA | 0.1% |
| 10385 | 5084 | AgAGCGAAUUUCAGUGUGA | 0.1% |
| 10386 | 5084 | AAAGCaAAUUUCAGUGUGA | 0.3% |
| 10387 | 5084 | AAAGCGAAcUUCAGUGUGA | 1.6% |
| 10388 | 5084 | AAAGCGAAUaUCAGUGUGA | 0.1% |
| 10389 | 5084 | AAAGCGAAUUUCAGcGUGA | 0.2% |
| 10390 | 5084 | AAAGCGAAUUUCAGUGUaA | 0.2% |
| 10391 | 5084 | AAAGCuAAUUUCAGUGUGA | 0.4% |
| 10392 | 5084 | AAAGCaAAcUUCAGUGUGA | 0.9% |
| 10393 | 5084 | AAAGCaAAcUUuAGUGUGA | 2.2% |
| 5085 | 5085 | AAGCGAAUUUCAGUGUGAU | 91.0% |
| 10394 | 5085 | AAGCGAAUUUCAGUGUGgU | 2.8% |
| 10395 | 5085 | AgGCGAAUUUCAGUGUGAU | 0.1% |
| 10396 | 5085 | gAGCGAAUUUCAGUGUGAU | 0.1% |
| 10397 | 5085 | AAGCaAAUUUCAGUGUGAU | 0.3% |
| 10398 | 5085 | AAGCGAAcUUCAGUGUGAU | 1.6% |
| 10399 | 5085 | AAGCGAAUaUCAGUGUGAU | 0.1% |
| 10400 | 5085 | AAGCGAAUUUCAGcGUGAU | 0.2% |
| 10401 | 5085 | AAGCGAAUUUCAGUGUaAU | 0.2% |
| 10402 | 5085 | AAGCGAAUUUCAGUGUGAc | 0.2% |
| 10403 | 5085 | AAGCuAAUUUCAGUGUGAU | 0.4% |
| 10404 | 5085 | AAGCaAAcUUCAGUGUGAU | 0.9% |
| 10405 | 5085 | AAGCaAAcUUuAGUGUGAU | 2.2% |
| 5086 | 5086 | GGCUUUCACCGAAGAGGGA | 90.9% |
| 10406 | 5086 | GGCUUUCACCGAAGAGGGg | 0.8% |
| 10407 | 5086 | GGCUUUCACCGAgGAGGGA | 0.1% |
| 10408 | 5086 | GGCUUUCACuGAAGAGGGA | 0.3% |
| 10409 | 5086 | GGCUUUCAuCGAAGAGGGA | 0.1% |
| 10410 | 5086 | GGCUUUuACCGAAGAGGGA | 0.1% |
| 10411 | 5086 | GGCUUUCACuGAgGAGGGA | 0.1% |
| 10412 | 5086 | aGCUUUCACCGAAGAGGGA | 0.1% |
| 10413 | 5086 | GGCcUUCACCGAAGAGGGA | 0.5% |
| 10414 | 5086 | GGCUaUCACCGAAGAGGGA | 0.1% |
| 10415 | 5086 | GGCUUUCACaGAAGAGGGA | 0.1% |
| 10416 | 5086 | GGCUUUCACCaAAGAGGGA | 0.1% |
| 10417 | 5086 | GGCUUUCACCGAAaAGGGA | 0.2% |
| 10418 | 5086 | GGCUUUCACCGAAGAaGGA | 0.1% |
| 10419 | 5086 | GGCUUUCACCGAAGAGGaA | 0.1% |
| 10420 | 5086 | GGCUUUCACCGAAGAGGGc | 0.6% |
| 10421 | 5086 | GGCUUUCACCGAAGcGGGA | 0.2% |
| 10422 | 5086 | GGgUUUCACCGAAGAGGGA | 0.1% |
| 10423 | 5086 | GGCcUUCACCGAAGAGGGg | 0.2% |
| 10424 | 5086 | GGCcUUCACCGAgGAGGGA | 2.0% |
| 5087 | 5087 | GCUUUCACCGAAGAGGGAG | 90.8% |
| 10425 | 5087 | GCUUUCACCGAAGAGGGgG | 0.8% |
| 10426 | 5087 | GCUUUCACCGAgGAGGGAG | 0.1% |
| 10427 | 5087 | GCUUUCACuGAAGAGGGAG | 0.3% |
| 10428 | 5087 | GCUUUCAuCGAAGAGGGAG | 0.1% |
| 10429 | 5087 | GCUUUuACCGAAGAGGGAG | 0.1% |
| 10430 | 5087 | GCUUUCACuGAgGAGGGAG | 0.1% |
| 10431 | 5087 | GCcUUCACCGAAGAGGGAG | 0.2% |
| 10432 | 5087 | GCUaUCACCGAAGAGGGAG | 0.1% |
| 10433 | 5087 | GCUUUCACaGAAGAGGGAG | 0.1% |
| 10434 | 5087 | GCUUUCACCaAAGAGGGAG | 0.1% |
| 10435 | 5087 | GCUUUCACCGAAaAGGGAG | 0.2% |
| 10436 | 5087 | GCUUUCACCGAAGAaGGAG | 0.1% |
| 10437 | 5087 | GCUUUCACCGAAGAGGaAG | 0.1% |
| 10438 | 5087 | GCUUUCACCGAAGAGGGAa | 0.1% |
| 10439 | 5087 | GCUUUCACCGAAGAGGGAc | 0.1% |
| 10440 | 5087 | GCUUUCACCGAAGAGGGCG | 0.6% |
| 10441 | 5087 | GCUUUCACCGAAGcGGGAG | 0.2% |
| 10442 | 5087 | GgUUUCACCGAAGAGGGAG | 0.1% |
| 10443 | 5087 | GCcUUCACCGAgGAGGGAG | 2.0% |
| 10444 | 5087 | GCcUUCACCGAAGAGGGAa | 0.3% |
| 10445 | 5087 | GCUUUCACaGAAGAaGGAG | 1.0% |
| 10446 | 5087 | GCcUUCACCGAAGAGGGga | 0.2% |
| 10447 | 5087 | GCUUUCACaGAAGAaGGgG | 0.2% |
| 10448 | 5087 | GCUUUCACgGAAGAaGGgG | 0.1% |
| 5088 | 5088 | AUUACUAAGGGCUUUCACC | 90.8% |
| 10449 | 5088 | AUUACUAAGGGCUUUCACu | 0.3% |
| 10450 | 5088 | AUUACUAAGGGCUUUCAuC | 0.1% |
| 10451 | 5088 | AUUACUAAGGGCUUUuACC | 0.1% |
| 10452 | 5088 | AUUACUgAGGGCUUUCACC | 0.4% |
| 10453 | 5088 | AUUAuUAAGGGCUUUCACC | 0.1% |
| 10454 | 5088 | AUUgCUAAGGGCUUUCACC | 0.8% |
| 10455 | 5088 | AcUACUAAGGGCUUUCACC | 0.6% |
| 10456 | 5088 | AUcACUAAGGGCUUUCACC | 0.1% |
| 10457 | 5088 | AUUACaAAGGGCUUUCACC | 0.1% |
| 10458 | 5088 | AUUACUAAGaGCUUUCACC | 0.1% |
| 10459 | 5088 | AUUACUAAGGGCcUUCACC | 2.7% |
| 10460 | 5088 | AUUACUAAGGGCUaUCACC | 0.1% |
| 10461 | 5088 | AUUACUAAGGGCUUUCACa | 0.1% |
| 10462 | 5088 | AUUACUAAGGGgUUUCACC | 0.1% |
| 10463 | 5088 | AUUACUuAGGGCUUUCACC | 0.1% |
| 10464 | 5088 | uUUACUAAGGGCUUUCACC | 0.1% |
| 10465 | 5088 | AcUACUAAGGGCUUUCACu | 0.1% |
| 5089 | 5089 | UUACUAAGGGCUUUCACCG | 90.8% |
| 10466 | 5089 | UUACUAAGGGCUUUCACuG | 0.3% |
| 10467 | 5089 | UUACUAAGGGCUUUCAuCG | 0.1% |
| 10468 | 5089 | UUACUAAGGGCUUUuACCG | 0.1% |
| 10469 | 5089 | UUACUgAGGGCUUUCACCG | 0.4% |
| 10470 | 5089 | UUAuUAAGGGCUUUCACCG | 0.1% |
| 10471 | 5089 | UUgCUAAGGGCUUUCACCG | 0.8% |
| 10472 | 5089 | cUACUAAGGGCUUUCACCG | 0.6% |
| 10473 | 5089 | UcACUAAGGGCUUUCACCG | 0.1% |
| 10474 | 5089 | UUACaAAGGGCUUUCACCG | 0.1% |
| 10475 | 5089 | UUACUAAGaGCUUUCACCG | 0.1% |
| 10476 | 5089 | UUACUAAGGGCcUUCACCG | 2.7% |
| 10477 | 5089 | UUACUAAGGGCUaUCACCG | 0.1% |
| 10478 | 5089 | UUACUAAGGGCUUUCACaG | 0.1% |
| 10479 | 5089 | UUACUAAGGGCUUUCACCa | 0.1% |
| 10480 | 5089 | UUACUAAGGGgUUUCACCG | 0.1% |
| 10481 | 5089 | UUACUuAGGGCUUUCACCG | 0.1% |
| 10482 | 5089 | cUACUAAGGGCUUUCACuG | 0.1% |
| 5090 | 5090 | AAGAGGGAGCAAUUGUUGG | 90.4% |
| 10483 | 5090 | AAGAGGGAGCAgUUGUUGG | 0.2% |
| 10484 | 5090 | AAGAGGGAGuAAUUGUUGG | 0.7% |
| 10485 | 5090 | AAGAGGGgGCAAUUGUUGG | 0.8% |
| 10486 | 5090 | AgGAGGGAGCAAUUGUUGG | 2.1% |
| 10487 | 5090 | AAaAGGGAGCAAUUGUUGG | 0.2% |
| 10488 | 5090 | AAGAaGGAGCAAUUGUUGG | 0.1% |
| 10489 | 5090 | AAGAGGaAGCAAUUGUUGG | 0.1% |
| 10490 | 5090 | AAGAGGGAaCAAUUGUUGG | 0.4% |
| 10491 | 5090 | AAGAGGGAGCAAUcGUUGG | 0.3% |
| 10492 | 5090 | AAGAGGGAGCAAUUaUUGG | 0.1% |
| 10493 | 5090 | AAGAGGGAGCAAUUGUaGG | 0.1% |
| 10494 | 5090 | AAGAGGGAGCAAUUGUUGc | 0.1% |
| 10495 | 5090 | AAGAGGGcGCAAUUGUUGG | 0.6% |
| 10496 | 5090 | AAGcGGGAGCAAUUGUUGG | 0.2% |
| 10497 | 5090 | AAGAGGGgaCAAUUGUUGG | 0.2% |
| 10498 | 5090 | AgGAGGGAGCAAUcGUUGG | 0.1% |
| 10499 | 5090 | AAGAGGGAcgAAUUGUUGG | 0.1% |
| 10500 | 5090 | AAGAaGGgGCAAUUGUaGG | 0.1% |
| 5091 | 5091 | GAAGAGGGAGCAAUUGUUG | 90.4% |
| 10501 | 5091 | GAAGAGGGAGCAgUUGUUG | 0.2% |
| 10502 | 5091 | GAAGAGGGAGuAAUUGUUG | 0.7% |
| 10503 | 5091 | GAAGAGGGgGCAAUUGUUG | 0.8% |
| 10504 | 5091 | GAgGAGGGAGCAAUUGUUG | 2.1% |
| 10505 | 5091 | aAAGAGGGAGCAAUUGUUG | 0.1% |
| 10506 | 5091 | GAAaAGGGAGCAAUUGUUG | 0.2% |
| 10507 | 5091 | GAAGAaGGAGCAAUUGUUG | 0.1% |
| 10508 | 5091 | GAAGAGGaAGCAAUUGUUG | 0.1% |
| 10509 | 5091 | GAAGAGGGAaCAAUUGUUG | 0.4% |
| 10510 | 5091 | GAAGAGGGAGCAAUcGUUG | 0.3% |
| 10511 | 5091 | GAAGAGGGAGCAAUUaUUG | 0.1% |
| 10512 | 5091 | GAAGAGGGAGCAAUUGUaG | 0.1% |
| 10513 | 5091 | GAAGAGGGcGCAAUUGUUG | 0.6% |
| 10514 | 5091 | GAAGcGGGAGCAAUUGUUG | 0.2% |
| 10515 | 5091 | GAAGAGGGgaCAAUUGUUG | 0.2% |
| 10516 | 5091 | GAgGAGGGAGCAAUcGUUG | 0.1% |
| 10517 | 5091 | GAAGAGGGAcgAAUUGUUG | 0.1% |
| 10518 | 5091 | GAAGAaGGgGCAAUUGUaG | 0.1% |
| 5092 | 5092 | AGAGGGAGCAAUUGUUGGC | 90.3% |
| 10519 | 5092 | AGAGGGAGCAAUUGUUGGu | 0.1% |
| 10520 | 5092 | AGAGGGAGCAgUUGUUGGC | 0.2% |
| 10521 | 5092 | AGAGGGAGuAAUUGUUGGC | 0.7% |
| 10522 | 5092 | AGAGGGgGCAAUUGUUGGC | 0.8% |
| 10523 | 5092 | gGAGGGAGCAAUUGUUGGC | 2.1% |
| 10524 | 5092 | AaAGGGAGCAAUUGUUGGC | 0.2% |
| 10525 | 5092 | AGAaGGAGCAAUUGUUGGC | 0.1% |
| 10526 | 5092 | AGAGGaAGCAAUUGUUGGC | 0.1% |
| 10527 | 5092 | AGAGGGAaCAAUUGUUGGC | 0.3% |
| 10528 | 5092 | AGAGGGAGCAAUUaUUGGC | 0.1% |
| 10529 | 5092 | AGAGGGAGCAAUUGUaGGC | 0.1% |
| 10530 | 5092 | AGAGGGAGCAAUUGUUGcC | 0.1% |
| 10531 | 5092 | AGAGGGcGCAAUUGUUGGC | 0.6% |
| 10532 | 5092 | AGcGGGAGCAAUUGUUGGC | 0.2% |
| 10533 | 5092 | AGAGGGAaCAAUUGUUGGu | 0.1% |
| 10534 | 5092 | AGAGGGgaCAAUUGUUGGC | 0.2% |
| 10535 | 5092 | AGAGGGAcgAAUUGUUGGC | 0.1% |
| 10536 | 5092 | AGAGGGAGCAAUcGUUGGa | 0.3% |
| 10537 | 5092 | AGAaGGgGCAAUUGUaGGC | 0.1% |
| 10538 | 5092 | gGAGGGAGCAAUcGUUGGa | 0.1% |
| 5093 | 5093 | UCACCGAAGAGGGAGCAAU | 90.3% |
| 10539 | 5093 | UCACCGAAGAGGGAGCAgU | 0.2% |
| 10540 | 5093 | UCACCGAAGAGGGAGuAAU | 0.7% |
| 10541 | 5093 | UCACCGAAGAGGGgGCAAU | 0.8% |
| 10542 | 5093 | UCACCGAgGAGGGAGCAAU | 2.1% |
| 10543 | 5093 | UCACuGAAGAGGGAGCAAU | 0.3% |
| 10544 | 5093 | UCAuCGAAGAGGGAGCAAU | 0.1% |
| 10545 | 5093 | UuACCGAAGAGGGAGCAAU | 0.1% |
| 10546 | 5093 | UCACuGAgGAGGGAGCAAU | 0.1% |
| 10547 | 5093 | UCACaGAAGAGGGAGCAAU | 0.1% |
| 10548 | 5093 | UCACCaAAGAGGGAGCAAU | 0.1% |
| 10549 | 5093 | UCACCGAAaAGGGAGCAAU | 0.2% |
| 10550 | 5093 | UCACCGAAGAaGGAGCAAU | 0.1% |
| 10551 | 5093 | UCACCGAAGAGGaAGCAAU | 0.1% |
| 10552 | 5093 | UCACCGAAGAGGGAaCAAU | 0.4% |
| 10553 | 5093 | UCACCGAAGAGGGcGCAAU | 0.6% |
| 10554 | 5093 | UCACCGAAGcGGGAGCAAU | 0.2% |
| 10555 | 5093 | UCACCGAAGAGGGgaCAAU | 0.2% |
| 10556 | 5093 | UCACaGAAGAaGGAGCAAU | 1.0% |
| 10557 | 5093 | UCACCGAAGAGGGAcgAAU | 0.1% |
| 10558 | 5093 | UCACaGAAGAaGGgGCAAU | 0.2% |
| 10559 | 5093 | UCACgGAAGAaGGgGCAAU | 0.1% |
| 5094 | 5094 | UUUCACCGAAGAGGGAGCA | 90.2% |
| 10560 | 5094 | UUUCACCGAAGAGGGAGuA | 0.7% |
| 10561 | 5094 | UUUCACCGAAGAGGGgGCA | 0.8% |
| 10562 | 5094 | UUUCACCGAgGAGGGAGCA | 0.1% |
| 10563 | 5094 | UUUCACuGAAGAGGGAGCA | 0.3% |
| 10564 | 5094 | UUUCAuCGAAGAGGGAGCA | 0.1% |
| 10565 | 5094 | UUUuACCGAAGAGGGAGCA | 0.1% |
| 10566 | 5094 | UUUCACuGAgGAGGGAGCA | 0.1% |
| 10567 | 5094 | cUUCACCGAAGAGGGAGCA | 0.2% |
| 10568 | 5094 | UaUCACCGAAGAGGGAGCA | 0.1% |
| 10569 | 5094 | UUUCACaGAAGAGGGAGCA | 0.1% |
| 10570 | 5094 | UUUCACCaAAGAGGGAGCA | 0.1% |
| 10571 | 5094 | UUUCACCGAAaAGGGAGCA | 0.2% |
| 10572 | 5094 | UUUCACCGAAGAaGGAGCA | 0.1% |
| 10573 | 5094 | UUUCACCCAAGAGGaAGCA | 0.1% |
| 10574 | 5094 | UUUCACCGAAGAGGGAaCA | 0.1% |
| 10575 | 5094 | UUUCACCGAAGAGGGcGCA | 0.6% |
| 10576 | 5094 | UUUCACCGAAGcGGGAGCA | 0.2% |
| 10577 | 5094 | cUUCACCGAgGAGGGAGCA | 2.0% |
| 10578 | 5094 | cUUCACCGAAGAGGGAaCA | 0.3% |
| 10579 | 5094 | UUUCACaGAAGAaGGAGCA | 1.0% |
| 10580 | 5094 | UUUCACCGAAGAGGGAcgA | 0.1% |
| 10581 | 5094 | cUUCACCGAAGAGGGgaCA | 0.2% |
| 10582 | 5094 | UUUCACaGAAGAaGGgGCA | 0.2% |
| 10583 | 5094 | UUUCACgGAAGAaGGgGCA | 0.1% |
| 5095 | 5095 | UUCACCGAAGAGGGAGCAA | 90.2% |
| 10584 | 5095 | UUCACCGAAGAGGGAGCAg | 0.2% |
| 10585 | 5095 | UUCACCGAAGAGGGAGuAA | 0.7% |
| 10586 | 5095 | UUCACCGAAGAGGGgGCAA | 0.8% |
| 10587 | 5095 | UUCACCGAgGAGGGAGCAA | 2.1% |
| 10588 | 5095 | UUCACuGAAGAGGGAGCAA | 0.3% |
| 10589 | 5095 | UUCAuCGAAGAGGGAGCAA | 0.1% |
| 10590 | 5095 | UUuACCGAAGAGGGAGCAA | 0.1% |
| 10591 | 5095 | UUCACuGAgGAGGGAGCAA | 0.1% |
| 10592 | 5095 | aUCACCGAAGAGGGAGCAA | 0.1% |
| 10593 | 5095 | UUCACaGAAGAGGGAGCAA | 0.1% |
| 10594 | 5095 | UUCACCaAAGAGGGAGCAA | 0.1% |
| 10595 | 5095 | UUCACCGAAaAGGGAGCAA | 0.2% |
| 10596 | 5095 | UUCACCGAAGAaGGAGCAA | 0.1% |
| 10597 | 5095 | UUCACCGAAGAGGaAGCAA | 0.1% |
| 10598 | 5095 | UUCACCGAAGAGGGAaCAA | 0.4% |
| 10599 | 5095 | UUCACCGAAGAGGGcGCAA | 0.6% |
| 10600 | 5095 | UUCACCGAAGcGGGAGCAA | 0.2% |
| 10601 | 5095 | UUCACCGAAGAGGGgaCAA | 0.2% |
| 10602 | 5095 | UUCACaGAAGAaGGAGCAA | 1.0% |
| 10603 | 5095 | UUCACCGAAGAGGGAcgAA | 0.1% |
| 10604 | 5095 | UUCACaGAAGAaGGgGCAA | 0.2% |
| 10605 | 5095 | UUCACgGAAGAaGGgGCAA | 0.1% |
| 5096 | 5096 | CUUUCACCGAAGAGGGAGC | 90.1% |
| 10606 | 5096 | CUUUCACCGAAGAGGGAGu | 0.7% |
| 10607 | 5096 | CUUUCACCGAAGAGGGgGC | 0.8% |
| 10608 | 5096 | CUUUCACCGAgGAGGGAGC | 0.1% |
| 10609 | 5096 | CUUUCACuGAAGAGGGAGC | 0.3% |
| 10610 | 5096 | CUUUCAuCGAAGAGGGAGC | 0.1% |
| 10611 | 5096 | CUUUuACCGAAGAGGGAGC | 0.1% |
| 10612 | 5096 | CUUUCACUGAgGAGGGAGC | 0.1% |
| 10613 | 5096 | CcUUCACCGAAGAGGGAGC | 0.2% |
| 10614 | 5096 | CUaUCACCGAAGAGGGAGC | 0.1% |
| 10615 | 5096 | CUUUCACaGAAGAGGGAGC | 0.1% |
| 10616 | 5096 | CUUUCACCaAAGAGGGAGC | 0.1% |
| 10617 | 5096 | CUUUCACCGAAaAGGGAGC | 0.2% |
| 10618 | 5096 | CUUUCACCGAAGAaGGAGC | 0.1% |
| 10619 | 5096 | CUUUCACCGAAGAGGaAGC | 0.1% |
| 10620 | 5096 | CUUUCACCGAAGAGGGAaC | 0.1% |
| 10621 | 5096 | CUUUCACCGAAGAGGGcGC | 0.6% |
| 10622 | 5096 | CUUUCACCGAAGcGGGAGC | 0.2% |
| 10623 | 5096 | gUUUCACCGAAGAGGGAGC | 0.1% |
| 10624 | 5096 | CcUUCACCGAgGAGGGAGC | 2.0% |
| 10625 | 5096 | CcUUCACCGAAGAGGGAaC | 0.3% |
| 10626 | 5096 | CUUUCACaGAAGAaGGAGC | 1.0% |
| 10627 | 5096 | CUUUCACCGAAGAGGGAcg | 0.1% |
| 10628 | 5096 | CcUUCACCGAAGAGGGgaC | 0.2% |
| 10629 | 5096 | CUUUCACaGAAGAaGGgGC | 0.2% |
| 10630 | 5096 | CUUUCACgGAAGAaGGgGC | 0.1% |
| 5097 | 5097 | CCGAAGAGGGAGCAAUUGU | 90.0% |
| 10631 | 5097 | CCGAAGAGGGAGCAgUUGU | 0.2% |
| 10632 | 5097 | CCGAAGAGGGAGuAAUUGU | 0.7% |
| 10633 | 5097 | CCGAAGAGGGgGCAAUUGU | 0.8% |
| 10634 | 5097 | CCGAgGAGGGAGCAAUUGU | 2.1% |
| 10635 | 5097 | CuGAAGAGGGAGCAAUUGU | 0.3% |
| 10636 | 5097 | uCGAAGAGGGAGCAAUUGU | 0.1% |
| 10637 | 5097 | CaGAAGAGGGAGCAAUUGU | 0.1% |
| 10638 | 5097 | CCaAAGAGGGAGCAAUUGU | 0.1% |
| 10639 | 5097 | CCGAAaAGGGAGCAAUUGU | 0.2% |
| 10640 | 5097 | CCGAAGAaGGAGCAAUUGU | 0.1% |
| 10641 | 5097 | CCGAAGAGGaAGCAAUUGU | 0.1% |
| 10642 | 5097 | CCGAAGAGGGAaCAAUUGU | 0.4% |
| 10643 | 5097 | CCGAAGAGGGAGCAAUcGU | 0.3% |
| 10644 | 5097 | CCGAAGAGGGAGCAAUUaU | 0.1% |
| 10645 | 5097 | CCGAAGAGGGcGCAAUUGU | 0.6% |
| 10646 | 5097 | CCGAAGcGGGAGCAAUUGU | 0.2% |
| 10647 | 5097 | CCGAAGAGGGgaCAAUUGU | 0.2% |
| 10648 | 5097 | CuGAgGAGGGAGCAAUcGU | 0.1% |
| 10649 | 5097 | CCGAAGAGGGAcgAAUUGU | 0.1% |
| 10650 | 5097 | CgGAAGAaGGgGCAAUUGU | 0.1% |
| 5098 | 5098 | ACCGAAGAGGGAGCAAUUG | 90.0% |
| 10651 | 5098 | ACCGAAGAGGGAGCAgUUG | 0.2% |
| 10652 | 5098 | ACCGAAGAGGGAGuAAUUG | 0.7% |
| 10653 | 5098 | ACCGAAGAGGGgGCAAUUG | 0.8% |
| 10654 | 5098 | ACCGAgGAGGGAGCAAUUG | 2.1% |
| 10655 | 5098 | ACuGAAGAGGGAGCAAUUG | 0.3% |
| 10656 | 5098 | AuCGAAGAGGGAGCAAUUG | 0.1% |
| 10657 | 5098 | ACaGAAGAGGGAGCAAUUG | 0.1% |
| 10658 | 5098 | ACCaAAGAGGGAGCAAUUG | 0.1% |
| 10659 | 5098 | ACCGAAaAGGGAGCAAUUG | 0.2% |
| 10660 | 5098 | ACCGAAGAaGGAGCAAUUG | 0.1% |
| 10661 | 5098 | ACCGAAGAGGaAGCAAUUG | 0.1% |
| 10662 | 5098 | ACCGAAGAGGGAaCAAUUG | 0.4% |
| 10663 | 5098 | ACCGAAGAGGGAGCAAUcG | 0.3% |
| 10664 | 5098 | ACCGAAGAGGGAGCAAUUa | 0.1% |
| 10665 | 5098 | ACCGAAGAGGGcGCAAUUG | 0.6% |
| 10666 | 5098 | ACCGAAGcGGGAGCAAUUG | 0.2% |
| 10667 | 5098 | ACCGAAGAGGGgaCAAUUG | 0.2% |
| 10668 | 5098 | ACuGAgGAGGGAGCAAUcG | 0.1% |
| 10669 | 5098 | ACCGAAGAGGGAcgAAUUG | 0.1% |
| 10670 | 5098 | ACgGAAGAaGGgGCAAUUG | 0.1% |
| 5099 | 5099 | CGAAGAGGGAGCAAUUGUU | 90.0% |
| 10671 | 5099 | CGAAGAGGGAGCAgUUGUU | 0.2% |
| 10672 | 5099 | CGAAGAGGGAGuAAUUGUU | 0.7% |
| 10673 | 5099 | CGAAGAGGGgGCAAUUGUU | 0.8% |
| 10674 | 5099 | CGAgGAGGGAGCAAUUGUU | 2.1% |
| 10675 | 5099 | uGAAGAGGGAGCAAUUGUU | 0.3% |
| 10676 | 5099 | aGAAGAGGGAGCAAUUGUU | 0.1% |
| 10677 | 5099 | CaAAGAGGGAGCAAUUGUU | 0.1% |
| 10678 | 5099 | CGAAaAGGGAGCAAUUGUU | 0.2% |
| 10679 | 5099 | CGAAGAaGGAGCAAUUGUU | 0.1% |
| 10680 | 5099 | CGAAGAGGaAGCAAUUGUU | 0.1% |
| 10681 | 5099 | CGAAGAGGGAaCAAUUGUU | 0.4% |
| 10682 | 5099 | CGAAGAGGGAGCAAUcGUU | 0.3% |
| 10683 | 5099 | CGAAGAGGGAGCAAUUaUU | 0.1% |
| 10684 | 5099 | CGAAGAGGGAGCAAUUGUa | 0.1% |
| 10685 | 5099 | CGAAGAGGGcGCAAUUGUU | 0.6% |
| 10686 | 5099 | CGAAGcGGGAGCAAUUGUU | 0.2% |
| 10687 | 5099 | CGAAGAGGGgaCAAUUGUU | 0.2% |
| 10688 | 5099 | uGAgGAGGGAGCAAUcGUU | 0.1% |
| 10689 | 5099 | CGAAGAGGGAcgAAUUGUU | 0.1% |
| 5100 | 5100 | CACCGAAGAGGGAGCAAUU | 90.0% |
| 10690 | 5100 | CACCGAAGAGGGAGCAgUU | 0.2% |
| 10691 | 5100 | CACCGAAGAGGGAGuAAUU | 0.7% |
| 10692 | 5100 | CACCGAAGAGGGgGCAAUU | 0.8% |
| 10693 | 5100 | CACCGAgGAGGGAGCAAUU | 2.1% |
| 10694 | 5100 | CACuGAAGAGGGAGCAAUU | 0.3% |
| 10695 | 5100 | CAuCGAAGAGGGAGCAAUU | 0.1% |
| 10696 | 5100 | uACCGAAGAGGGAGCAAUU | 0.1% |
| 10697 | 5100 | CACaGAAGAGGGAGCAAUU | 0.1% |
| 10698 | 5100 | CACCaAAGAGGGAGCAAUU | 0.1% |
| 10699 | 5100 | CACCGAAaAGGGAGCAAUU | 0.2% |
| 10700 | 5100 | CACCGAAGAaGGAGCAAUU | 0.1% |
| 10701 | 5100 | CACCGAAGAGGaAGCAAUU | 0.1% |
| 10702 | 5100 | CACCGAAGAGGGAaCAAUU | 0.4% |
| 10703 | 5100 | CACCGAAGAGGGAGCAAUc | 0.3% |
| 10704 | 5100 | CACCGAAGAGGGcGCAAUU | 0.6% |
| 10705 | 5100 | CACCGAAGcGGGAGCAAUU | 0.2% |
| 10706 | 5100 | CACCGAAGAGGGgaCAAUU | 0.2% |
| 10707 | 5100 | CACuGAgGAGGGAGCAAUc | 0.1% |
| 10708 | 5100 | CACCGAAGAGGGAcgAAUU | 0.1% |
| 10709 | 5100 | CACgGAAGAaGGgGCAAUU | 0.1% |

### Example 16

### Intravenous Delivery of siRNA Inhibits Influenza Virus Production in Vivo

[0279] The present example demonstrates that both the prophylactic and post-infection intravenous administration of siRNA targeted to viral NP transcripts significantly inhibited influenza virus replication in the mouse (FIG. 2). The following is a list of exemplary human influenza virus conserved target sequence (derived from Accession No. AF389119):

| | |
|---|---|
| gccacugaaaucagagcau, | (SEQ ID NO: 10794) |
| ucagagcauccgucggaaa, | (SEQ ID NO: 10795) |
| ggacgauucuacauccaaa, | (SEQ ID NO: 10796) |
| cagcuuaacaauagagaga, | (SEQ ID NO: 10797) |
| gcuuaacaauagagagaau, | (SEQ ID NO: 10798) |
| aauagagagaauggugcuc, | (SEQ ID NO: 10799) |
| gggaaagauccuaagaaaa, | (SEQ ID NO: 10800) |
| ggaaagauccuaagaaaac, | (SEQ ID NO: 10801) |
| ugagagaacucauccuuua, | (SEQ ID NO: 10802) |
| uuaugacaaagaagaaaua, | (SEQ ID NO: 10803) |
| acaagaauugcuuaugaaa, | (SEQ ID NO: 10804) |
| gaauugcuuaugaaagaau, | (SEQ ID NO: 10805) |
| aagcaaugauggaucaagu, | (SEQ ID NO: 10806) |
| gcaaugauggaucaaguga, | (SEQ ID NO: 10807) |
| ugauggaucaagugagaga, | (SEQ ID NO: 10808) |
| ccacuagaggaguucaaau, | (SEQ ID NO: 10809) |
| cacuagaggaguucaaauu, | (SEQ ID NO: 10810) |
| gaggaaacaccaaucaaca, | (SEQ ID NO: 10811) |
| ggaaacaccaaucaacaga, | (SEQ ID NO: 10812) |
| gggccaaaucagcauacaa, | (SEQ ID NO: 10813) |
| caaccauuauggcagcauu, | (SEQ ID NO: 10814) |
| ccauuauggcagcauucaa, | (SEQ ID NO: 10815) |
| aggaugauggaaagugcaa, | (SEQ ID NO: 10816) |
| gaugauggaaagugcaaga, | (SEQ ID NO: 10817) |
| gaguaaugaaggaucuuau, | (SEQ ID NO: 10818) |
| ggaucuuauuucuucggag, | (SEQ ID NO: 10819) |
| gaucuuauuucuucggaga, | (SEQ ID NO: 10820) |
| ucuuauuucuucggagaca, | (SEQ ID NO: 10821) |
| ggaguacgacaauuaaaga, | (SEQ ID NO: 10822) |

The following is a list of sequences that represent a fragment of the influenza NP gene for multiple species. The bolded region is a conserved region shared among these sequences.

### Influenza Strain, Nucleotide Sequence of Conserved Region of Influenza NP Gene, SEQ ID NO

| | | |
|---|---|---|
| PR8 (H1N1), | AATGAAGGATCTTATTTCTTCGGAGACAATGCAGAGGAGTACGACAATTA, | 11471 |
| WSN (H1N1), | AATGAAGGATCTTATTTCTTCGGAGACAATGCAGAGGAGTACGACAATTA, | 11472 |
| Lenn.(H2N2), | AATGAAGGATCTTATTTCTTCGGAGACAATGCAGAGGAGTACGACAATTA, | 11473 |
| HK (H3N2), | AATGAAGGATCTTATTTCTTCGGAGACAATGCAGAGGAGTACGACAATTA, | 11474 |
| Memphis (H3N2), | AATGAAGGATCTTATTTCTTCGGAGACAATGCAGAGGAGTACGACAATTA, | 11475 |
| BK (H5N1), | AATGAAGGATCTTATTTCTTCGGAGACAATGCAGAGGAATATGACAATTG, | 11476 |
| Duck (H10N7), | AACGAGGGATCTTATTTCTTCGGAGACAATGCAGAGGAATATGACAATTA, | 11477 |
| Equine (H7N7), | AATGAAGGGTCTTATTTCTTCGGAGACAATGCTGACGAGTTTGACAGTTA, | 11478 |
| Whale (H13N2), | AATGAGGGATCTTATTTCTTCGGAGACAATGCTGAGGAGTATGACAATTG, | 11479 |
| Chicken(H9N2), | AATGAAGGATCTTATTTCTTCGGAGACAATGCATAGGAGTATGACAATTA, | 11480 |
| Swine (H4N6), | AACGAAGGGTCTTATTTCTTCGGAGACAATGCAGAGGAATATGACAATTA, | 11481 |

[0281] To test the prophylactic use of viral targeting siRNA, NP-1496 (INFsi-9) was mixed with the cationic delivery polymer jetPEI (Qbiogene) and administered (2 mg/Kg) to C57BL/6 mice intravenously (IV). Three hours later, mice were inoculated (intranasally) with 1×10⁴ PR8 viral particles to initiate infection and later sacrificed 24 hrs post-infection to assay lung homogenates for viral titers using the MDCK hemagglutinin assay.

[0282] As shown in FIG. 2, the average log₁₀TCID₅₀ of the lung homogenate for mice that received no siRNA treatment (NT; filled squares) or received a siRNA targeted to GFP (GFP 60 μg; open squares) was 4.2. In mice that were pretreated with 30 μg siRNA targeted to NP (NP 30 μg; open circles) and jetPEI, the average log₁₀TCID₅₀ of the lung homogenate was 3.9. In mice that were pretreated with 60 μg siRNA targeted to NP (NP 60 μg; filled circles) and jetPEI, the average log₁₀TCID₅₀ of the lung homogenate was 3.2. The difference in virus titer in the lung homogenate between the group that received no treatment and the group that received 60 μg NP siRNA was significant with P=0.0002.

[0283] In order to evaluate siRNA as a therapeutic treatment for an existing influenza infection, mice were infected with PR8 virus intranasally and five hours later were given NP-1496/jetPEI or PA-2087/jetPEI mixture intravenously. Viral titers in the lungs were assayed by MDCK-HA assay 28 hours post-infection. All treatments significantly reduced viral titer in comparison to untreated, infected mice; dose-responsive decreases in viral titers were observed in mice treated with NP-1496 (FIG. 3). A suppression effect of siRNA treatment at 24 hours post-infection was also seen in mice.

[0284] Further, the designed siRNAs can also protect mice from a lethal challenge of avian influenza virus. Mice injected (2×) with control (GFP-targeting) siRNAs and subsequently challenged with a lethal dose of H1N1 (PR8), H5N1 or H7N7 virus, continuously lost weight and succumbed to the infection between days 7-10, as shown in FIG. 4. However, infected mice that received the combined siRNAs NP-1496 and PA-2087 recovered from the initial weight loss. At least 50% of the mice survived the lethal H7N7 challenge, 87% survived the lethal H5N1 challenge and 100% survived the H1N1 challenge. Thus, siRNAs specific for the conserved regions of the influenza viral genome confers broad protection, including protection against the highly pathogenic avian influenza viruses (FIG. 4).

### Example 17a

### Intranasal Delivery of siRNA Inhibits Influenza Production in Mice

[0285] The present example demonstrates that prophylactic intranasal administration of siRNA targeted to viral NP transcripts inhibited influenza virus replication and reduced viral RNA levels in a dose-dependent manner in the mouse.

[0286] Influenza normally infects and replicates in the upper respiratory tract and lungs. Therefore, due to accessibility, topical administration, i.e. intranasal and/or pulmonary delivery of drug should be ideal for influenza prophylaxis and therapy. Specifically, intranasal and/or pulmonary delivery of siRNAs is advantageous in treating influenza virus infection, because, 1) high local siRNA concentration are easily achieved when local delivery route is used and thus less siRNA is required compared to systemic delivery and 2) intranasal and/or pulmonary delivery methods are non-invasive. Thus, an intranasal delivery of siRNA in the influenza mouse model was pursued.

[0287] Unlike conventional intravenous delivery of naked siRNA which resulted in negligible silencing effect, intranasally administered siRNA (unmodified, in PBS or saline) can be detected in the lungs and is able to silence endogenous gene expression or inhibit virus production in lung tissue. To test the efficacy of non-invasive delivery of influenza targeting siRNA, the NP-1496 siRNA (in PBS) was delivered intranasally. BALB/c mice were treated intranasally with indicated amounts of NP specific siRNA in PBS or PBS control. Two hours later, all mice were infected intranasally (1000 pfu/mouse) with the PR8 serotype. The lungs were harvested 24 hours post-infection and viral titer was measured from lung homogenates by MDCK-HA assay. P values between PBS and siRNA groups indicated statistical significance with 0.5, 1 and 2 mg/kg siRNA treated groups. The data is shown in FIG. 5.

[0288] In the absence of a carrier, naked NP targeting siRNA was effective in suppressing viral production in the mouse lung (FIG. 5; 24 hours post-infection). Suppression was dose dependent, with a 7-fold reduction being observed when 2 mg/kg of siRNA was delivered two hours prior to infection.

[0289] The effects of intranasal delivery of NP-targeting siRNA were also investigated at higher concentrations (10 mg/kg, delivered 3 hours prior to infection) using target mRNA expression (quantitative RT-PCR) and viral titer (MDCK-HA) to measure efficacy. BALB/c mice were administered control and NP-targeting siRNA intranasally (10 mg/kg, in PBS). Three hours later, all the mice were infected intranasally with PR8 virus (50 pfu/mouse). The lungs were harvested at 24 and 48 hours post-infection and total RNA was isolated from the left lung. Total mRNA was reverse transcribed to cDNA using dT18 primers. Real time PCR was carried out using PB1 specific primers to quantify viral mRNA levels. GAPDH was used as an internal control. The right and middle lungs were homogenized and the viral titer was measured by MDCK-HA assay. The virus titer in the samples at 48 hours post-infection is shown in the FIG. 6 statistic significance was found between PBS and NP siRNA treated group using student t test (p=0.01); the titer in the samples 24 hours post-infection was too low to detect, possibly due to siRNA directed suppression.

[0290] The results are shown in FIG. 6. FIG. 6 compares the normalized quantitative PCR results and the viral titer assay results. Viral mRNA level measured at 24 hours post-infection show a 55.2% inhibition but by 48 hours post-infection only minimal inhibition was observed. In contrast, the MDCK-HA assay of mouse lung samples indicated 84.6% viral titer suppression on day 2. Compared to the MDCK-HA assay that measures live virus particles, viral mRNA quantification is probably more sensitive in reflecting the early changes in viral replication. Thus, the decrease in viral mRNA suppression on day 2 is probably due to the decreased RNAi effect in the mouse lung by that time.

[0291] Also, the effect on influenza viral titer in mouse between naked siRNA targeting the NP transcript delivered intranasally and the influenza treatment, Tamiflu, was compared. Relative to the level of viral titer observed with the GPF control siRNA, both the intranasally delivered naked siRNA and Tamiflu treatments reduced influenza viral titers.

[0292] The effect on viral titer by NP-viral transcript targeting in mouse after intranasal delivery the siRNA G1498 (INFsi-8) was also addressed. The G1498 siRNA exhibited significant ability to reduce viral titers in vitro and thus was chosen for further characterization in vivo. The control for this study was an unmodified siRNA targeted against luciferase (Dharmacon; Luc). Ten week old female BALB/c (Taconic) mice with a weight range of 18-22 grams were used in the study. There were ten mice per study group. The mice were dosed with G1498 siRNA in PBS at 2 mg/kg, 5 mg/kg, 10 mg/kg, 20 mg/kg and 30 mg/kg. The control groups were dosed the same, except no controls received a 2 mg/kg dose. Both the G1498 and Luc siRNA control groups were infected with PR8 influcenze virus at 30 pfu in 30 μl in PBS four hours post-siRNA administration. Forty-eights hours post-infection, the mouse lungs were harvested and viral titers measured therefrom in MDCK cells with a TCID₅₀ assay.

[0293] The results are shown in FIG. 7. The results of the TCID₅₀ assay show that the G1498 siRNA at 2 mg/kg suppressed influenza production in the mouse lung by 86%, at 5 mg/kg and 10 mg/kg by 90.6%, at 20 mg/kg by 96.6% and at 30 mg/kg by 95.2%. In relation to PBS alone or the Luc control siRNA study groups, the mice administered the G1498 siRNA intranasally, as a whole, showed significant differences (P<0.001). The mice that received PBS did not exhibit significant difference compared to the mice group that received the Luc siRNA, as a whole, (P>0.05). Each study group that received a dose of the G1498 siRNA significantly differed from the PBS group or Luc siRNA control study group at 30 mg/kg (P<0.05). Finally, no significant dose response was observed with mice that received the range of G1498 siRNA doses.

### Example 17b

### Intranasal Delivery of siRNA Inhibits Cyclophilin B Expression in a Non-Influenza Mouse Model

[0294] The present example demonstrates that the airway cell uptake of naked siRNA via intranasal administration is not a specific phenomenon of influenza-infected cells. In addition, naked siRNA delivered intranasally also reduced endogenous gene, cyclophilin B, expression in the lungs of healthy mice. Balb/c mice were treated intranasally with 10 mg/kg cyclophilin B specific siRNA (Dharmacon) or GFP siRNA in PBS or PBS control. There were five mice per group. The mouse lungs were harvested 24 hours later. Total RNA was purified from the lung samples and reverse transcription was conducted using dT18 primer. Cyclophilin B-specific primers (Applied Biosystem) were used in real-time PCR to quantify the target mRNA level. GAPDH-specific primers (Applied Biosystem) were also used in the PCR as a control.

[0295] As shown in FIG. 8, the cyclophilin B mRNA in the lungs was inhibited by 70% 24 hours after the mice received 10 mg/kg cyclophilin B siRNA intranasally. These data indicate that the airway cell uptake of naked siRNA via intranasal administration is not a specific phenomenon in influenza-infected cells. Endogenous gene silencing in healthy cells in healthy animal can be also achieved by naked siRNA delivered intranasally. This finding is highly relevant for the utility of siRNA for prophylaxis, which would occur in the absence of infection.

### Example 18

### Influenza Viral Titer Reduction Following Intranasal Administration of Cochleate siRNA Formulations in Mouse

[0296] The present demonstrates that intranasal administration of the G1498 siRNA in a cochleate delivery formulation (BDSI, North Carolina) enhances influenza viral suppression relative to naked siRNA in mouse. For the instant example, the formulations tested are shown below in Table 21.

TABLE 21
Formulations Administered Intranasally to Mice

| Study Group | Formulation |
|---|---|
| Buffer (Control) | TES + 2 mM Ca⁺² |
| Cochleate Placebo | 40 mg DOPS/ml |
| Cochleate Cyclophilin B siRNA | 4 mg/ml (10 mg/kg) siRNA by starting material |
| | (0.963 mg/ml by HPLC) |
| Cochleate Unlipidated G1498 | 4 mg/ml siRNA by staring material (2.752 mg/ml |
| siRNA (U-flu) | by HPCL) |
| Cochleate Lipidated G1498 | 4 mg/ml siRNA by staring material (1.546 mg/ml |
| siRNA (L-flu) | HPLC) |
| Naked Unlipidated G1498 | 6.8 mg/kg siRNA by staring material (2.752 mg/ml |
| siRNA (U-flu) | HPLC) |
| Naked Unlipidated G1498 | 10 mg/kg siRNA by staring material (4 mg/ml |
| siRNA (U-flu) | HPLC) |
| Naked Lipidated G1498 siRNA | 10 mg/kg siRNA by staring material (4 mg/ml HPLC) |
| (U-flu) | |

The formulations listed above were administered intranasally five hours post-infection with influenza. The viral titer for the whole lung was measured 48 hours post-infection. There were ten mice in each study group, except the naked unlipidated U-flu groups, which had five.

[0297] The lung viral titer results are shown in FIG. 9. Each dot on the graph represents one animal. Statistics was performed by One-Way-Anova. The numbers with an asteric indicates that the mean value has a statistical difference relative to the controls (placebo or buffer). The data in FIG. 8 show that the G1498 siRNA administered intranasally with the cochleate delivery formulation exhibit greater viral titer reduction relative to the naked G1498 siRNA and the controls (Buffer alone or the Cochleate Placebo). Some degree of toxicity was observed in all groups that receive the cochleate formulations or naked lapidated siRNA.

### Example 19

### Influenza Viral Titer Reduction Following Intravenously Administration of Cochleate siRNA Formulations in Mouse

[0298] The present demonstrates that intravenous administration of the G1498 siRNA in a cochleate delivery formulation enhances influenza viral suppression relative to naked siRNA in mouse. The formulations tested are shown below in Table 22.

TABLE 22
Formulations Administered Intravenouslly to Mice

| Study Group | Formulation |
|---|---|
| Buffer (Control) | TES + 2 mM Ca⁺² |
| Cochleate Placebo | 10 mg DOPS/ml |
| Cochleate Cyclophilin B siRNA | 1 mg/ml (10 mg/kg) siRNA by starting material |
| | (0.607 mg/ml by HPLC) |
| Cochleate Unlipidated G1498 | 1 mg/ml siRNA by staring material (1.196 mg/ml |
| siRNA (U-flu) | by HPCL) |
| Cochleate Lipidated G1498 | 1 mg/ml siRNA by staring material (0.381 mg/ml |
| siRNA (L-flu) | HPLC) |
| Naked Unlipidated G1498 | 10 mg/kg siRNA by staring material (4 mg/ml HPLC) |
| siRNA (U-flu) | |

The formulations listed above were administered intranasally five hours post-infection with influenza. The viral titer for the whole lung was measured 48 hours post-infection. There were ten mice in each study group, except the naked unlipidated U-flu groups, which had five.

[0299] The lung viral titer results are shown in FIG. 10A. Each dot on the graph represents one animal. Statistics was performed by One-Way-Anova. The numbers with an asteric indicates that the mean value has a statistical difference relative to the controls (placebo or buffer). The data in FIG. 9 show that the G1498 siRNA administered intravenously with the cochleate delivery formulation exhibited greater viral titer reduction relative to the controls (Buffer alone or the Cochleate Placebo). Moreover, the U-flu formulation administered intranasally also reduced lung viral titers.

[0300] A dose response profile was also generated for intravenously administered siRNA delivered in cochleate formulations. The formulations tested are shown below in Table 23.

TABLE 23
Formulations Administered Intravenouslly to Mice for
Dose-Response Study

| Study Group | Formulation |
|---|---|
| Buffer (Control) | TES + 2 mM Ca⁺² |
| Cochleate Unlipidated | 2.5 mg/ml (10 mg/kg) siRNA by |
| Cyclophilin B siRNA | starting material |
| Cochleate Unlipidated G1498 | 2.5 mg/ml siRNA by staring material |
| siRNA (U-flu) | |
| Cochleate Unlipidated G1498 | 1 mg/ml siRNA by staring material |
| siRNA (L-flu) | |
| Cochleate Unlipidated G1498 | 0.4 mg/kg siRNA by staring material |
| siRNA (U-flu) | |
| Cochleate Unlipidated G1498 | 0.15 mg/kg siRNA by staring material |
| siRNA (U-flu) | |

The formulations listed above were administered intranasally five hours post-infection with influenza. The viral titer for the whole lung was measured 48 hours post-infection. There were ten mice in each study group.

[0301] The lung viral titer results are shown in FIG. 10B. Each dot on the graph represents one animal. Statistics was performed by One-Way-Anova. The numbers with an asteric indicates that the mean value has a statistical difference relative to the controls (placebo or buffer). The data in FIG. 10 show that the G1498 siRNA administered intravenously with the cochleate delivery formulation exhibited greater viral titer reduction relative to the Buffer control. Moreover, a dose-response was observed. As the dose of the G1498 siRNA in the cochleate formulation increased a greater reduction in mouse lung viral titers was observed.

[0302] The same formulations listed in Table 23 above were administered via oral gavage to mice following the same protocols and procedures for measuring mouse lung viral titers. The lung viral titer results are shown in FIG. 10B. As stated previously, each dot represents an animal. No statistical differences among the test formulation were observed. Additionally, no toxicity was observed in any of the study groups.

### Example 20

### Distribution of Rhodamine-Cochleate in the Mouse Lung Before and After Influenza Infection

[0303] The present example demonstrates that intranasal administration of the rhodamine-cochleate siRNA-free formulation showed a wide distribution of the rhodamine compared to intravenous or oral gavage administration. For the purpose of the instant example, rhodamine was encapsulated in the siRNA-free cochleate. The rhodamine-cochleate formulation was administered via intranasal (40 mg/ml, 50 μl/mouse), intravenous (10 mg/ml, 200 μl/mouse) or oral gavage (10 mg/ml, 200 μl/mouse) four hours either pre- or post-influenza infection. The mouse lung tissue was collected five hours after the final injection or infection and then frozen with dry ice and sectioned for analysis. The frozen sections was stained with DAPI for nuclei and imaged.

[0304] The results from pre- and post-influenza infection were similar for all groups. However, the group subject to the intranasal administration of the rhodamine-cochleate formulation showed a wide distribution of rhodamine in the lung section. The group subject to the intravenous administration showed some rhodamine aggregation but had limited distributed positive signal. The ones with oral gavage did not show positive signals. These data indicate that through distribution of a cochleate formulation in the lung for treatment of a respiratory virus infection is best achieved with intranasal administration. Through distribution within the lung is essential for effective reduction of viral titers.

### Example 21

### Generation and Testing of siRNAs Derived from Parainfluenza Virus

[0305] Parainfluenza virus nuclear proteins were identified using the methods above or from publicly available sequences. siRNAs were identified in nucleic acids encoding parainfluenza virus nuclear proteins using the methods described above.

[0306] Tables 24A-B list 19-nucleotide regions that are siRNA parainfluenza virus nucleoprotein target sequences. The provided 19 nucleotide region is useful as the sense strand to design a variety of siRNA molecules, optionally having different 3′ overhangs in either or both the sense and antisense strands. Thus, one skilled in the art will appreciate that a variety of sense and antisense siRNA sequences may be obtained from each sequence listed in Tables 24A-B.

[0307] Tables 24A-B, and all other tables provided herein that disclose target sequences derived from viruses (except for Influenza virus described above) also disclose a subset of target sequences termed “Conserved target sequences.” These conserved target sequences are highly conserved among a plurality of virus nucleoprotein sequences.

[0308] Tables 24A-B, and all other tables provided herein that disclose target sequences derived from negative strand viruses having non-segmented genomes also disclose the position of the 5′ nucleotide in the viral nucleoprotein gene.

TABLE 24A

human parainfluenza virus-2 (Accession no. NC_003443)

| | | | | | |
|---|---|---|---|---|---|
| 5′ | | | 5′ | | |
| nucleotide | | SEQ ID | nucleotide | Conserved target | SEQ ID |
| position | Target sequence | NO | position | sequence | NO |

| | | | | | |
|---|---|---|---|---|---|
| 81 | ccgguaacgauuccaguuu | 10823 | 81 | ccgguaacgauuccaguuu | 10823 |
| 83 | gguaacgauuccaguuuua | 10824 | 83 | gguaacgauuccaguuuua | 10824 |
| 263 | ggguauuugucaucaauaa | 10825 | 263 | ggguauuugucaucaauaa | 10825 |
| 264 | gguauuugucaucaauaau | 10826 | 264 | gguauuugucaucaauaau | 10826 |
| 294 | cguaagaucuagacuuuua | 10827 | 294 | cguaagaucuagacuuuua | 10827 |
| 375 | ccucagucuuuuaucacua | 10828 | 375 | ccucagucuuuuaucacua | 10828 |
| 408 | gaguaaucacaucaaauua | 10829 | 408 | gaguaaucacaucaaauua | 10829 |
| 439 | ccagaagccagcauagaua | 10830 | 439 | ccagaagccagcauagaua | 10830 |
| 449 | gcauagauagaguagagau | 10831 | 449 | gcauagauagaguagagau | 10831 |
| 450 | cauagauagaguagagaua | 10832 | 450 | cauagauagaguagagaua | 10832 |
| 465 | gauaacaggguuugagaau | 10833 | 465 | gauaacaggguuugagaau | 10833 |
| 473 | gguuugagaauaauucauu | 10834 | 473 | gguuugagaauaauucauu | 10834 |
| 502 | ccagaugcucgaucaacua | 10835 | 502 | ccagaugcucgaucaacua | 10835 |
| 527 | gaggagaggugcuggcuuu | 10836 | 527 | gaggagaggugcuggcuuu | 10836 |
| 556 | gcugaggacauuccugaua | 10837 | 556 | gcugaggacauuccugaua | 10837 |
| 561 | ggacauuccugauacccuu | 10838 | 561 | ggacauuccugauacccuu | 10838 |
| 585 | ccaaacuccauuuguaaau | 10839 | 585 | ccaaacuccauuuguaaau | 10839 |
| 666 | gcuuaugcaggcauggaua | 10840 | 666 | gcuuaugcaggcauggaua | 10840 |
| 741 | ggcuaaauaucaacaacaa | 10841 | 741 | ggcuaaauaucaacaacaa | 10841 |
| 761 | ggagaaucaaugcuaggua | 10842 | 761 | ggagaaucaaugcuaggua | 10842 |
| 762 | gagaaucaaugcuagguau | 10843 | 762 | gagaaucaaugcuagguau | 10843 |
| 790 | ccugaagcacaaagacuaa | 10844 | 790 | ccugaagcacaaagacuaa | 10844 |
| 796 | gcacaaagacuaauucaga | 10845 | 796 | gcacaaagacuaauucaga | 10845 |
| 822 | ccgcaagucaaugguagua | 10846 | 822 | ccgcaagucaaugguagua | 10846 |
| 892 | gcaaaccgcuacuaugcua | 10847 | 955 | ggauuuuucuuaacacuua | 10849 |
| 942 | cagcggaaugggaggauuu | 10848 | 1025 | gggaacuccagaaauuaaa | 10852 |
| 955 | ggauuuuucuuaacacuua | 10849 | 1082 | ccaaguacauggcucuauu | 10853 |
| 985 | ggaacaagauggccuacau | 10850 | 1086 | guacauggcucuauuagaa | 10854 |
| 1024 | ggggaacuccagaaauuaa | 10851 | 1106 | caccaaaacugauggauuu | 10855 |
| 1025 | gggaacuccagaaauuaaa | 10852 | 1133 | cugaauauccauuagauua | 10856 |
| 1082 | ccaaguacauggcucuauu | 10853 | 1164 | ggguauuggaacuguccuu | 10857 |
| 1086 | guacauggcucuauuagaa | 10854 | 1172 | gaacuguccuugauacaaa | 10858 |
| 1106 | caccaaaacugauggauuu | 10855 | 1183 | gauacaaauaugagaaauu | 10859 |
| 1133 | cugaauauccauuagauua | 10856 | 1204 | gcauacgguagaucauauu | 10860 |
| 1164 | ggguauuggaacuguccuu | 10857 | 1209 | cgguagaucauauuuaaau | 10861 |
| 1172 | gaacuguccuugauacaaa | 10858 | 1217 | cauauuuaaaucagcaaua | 10862 |
| 1183 | gauacaaauaugagaaauu | 10859 | 1247 | gaguagaaacagcaaggaa | 10863 |
| 1204 | gcauacgguagaucauauu | 10860 | 1307 | gcaugacugcugcagacaa | 10864 |
| 1209 | cgguagaucauauuuaaau | 10861 | 1308 | caugacugcugcagacaaa | 10865 |
| 1217 | cauauuuaaaucagcaaua | 10862 | 1339 | gcaaccauaucaaagcuau | 10866 |
| 1247 | gaguagaaacagcaaggaa | 10863 | 1398 | cccauuugcuggagcaaau | 10867 |
| 1307 | gcaugacugcugcagacaa | 10864 | 1408 | ggagcaaaugacagagaaa | 10868 |
| 1308 | caugacugcugcagacaaa | 10865 | 1419 | cagagaaaugggaggacaa | 10869 |
| 1339 | gcaaccauaucaaagcuau | 10866 | 1428 | gggaggacaagcaaaugau | 10870 |
| 1398 | cccauuugcuggagcaaau | 10867 | 1429 | ggaggacaagcaaaugaua | 10871 |
| 1408 | ggagcaaaugacagagaaa | 10868 | 1453 | guguauaacuucaauccaa | 10872 |
| 1419 | cagagaaaugggaggacaa | 10869 | 1512 | ggacagaauugacaacgau | 10873 |
| 1428 | gggaggacaagcaaaugau | 10870 | 1515 | cagaauugacaacgaucaa | 10874 |
| 1429 | ggaggacaagcaaaugaua | 10871 | 1589 | gugacaaccagcagagauu | 10875 |
| 1453 | guguauaacuucaauccaa | 10872 | 1621 | ccgcaaagaacaucaggua | 10876 |
| 1512 | ggacagaauugacaacgau | 10873 | 1622 | cgcaaagaacaucagguau | 10877 |
| 1515 | cagaauugacaacgaucaa | 10874 | 1682 | gugcuaugcaugagcaaua | 10878 |
| 1589 | gugacaaccagcagagauu | 10875 | 1710 | ccaggaugaugaugccaau | 10879 |
| 1621 | ccgcaaagaacaucaggua | 10876 | 1713 | ggaugaugaugccaaugau | 10880 |
| 1622 | cgcaaagaacaucagguau | 10877 | 1733 | ccacagaugggaaugacau | 10881 |
| 1682 | gugcuaugcaugagcaaua | 10878 | | | |
| 1710 | ccaggaugaugaugccaau | 10879 | | | |
| 1713 | ggaugaugaugccaaugau | 10880 | | | |
| 1733 | ccacagaugggaaugacau | 10881 | | | |
| 1781 | ccuaacucucaaugucaua | 10882 | | | |
| 1887 | cggaaacaauucucucaua | 10883 | | | |
| 1888 | ggaaacaauucucucauaa | 10884 | | | |

### In Vitro Analysis

[0309] Lung epithelial cell line A549 cells will be transfected with different concentrations of siRNAs. Sicontrol from Dharmacon will be used as control siRNA. Lipofectamine 2000 will be used as transfection reagent and manufacturer's instruction will be followed. 4 hours later, transfected A549 cells will be infected with human parainfluenza virus (hPIV). At a suitable time point cells will be harvested and RNA will be isolated. The RT and real time PCR will be performed as described by Hino et al (5). The culture supernatant from siRNA transfected and PIV infected cells will be collected. To measure the virus titer hemagglutination assay will be performed by mixing 2-fold serial dilution of supernatant with 0.05% guinea pig erythrocytes (6). A549 cells will also be first infected with hPIV and transfected with different concentrations of siRNAs at a suitable time point. At a suitable time point cells will be harvested and supernatant collected. RNA will be isolated from cells and RT and real time PCR will be performed with gene specific primer as described above to determine the silencing effect of siRNA. Hemagglutination assay described above as well as virus non-target gene specific primer (eg. Polymerase) in real time PCR will be used to measure the reduction of virus replication.

### In Vivo Analysis

[0310] Balb/c mice under anesthesia will be administered intranasally with 2-10 mg/kg dose of modified or unmodified siRNA with or without formulation. Sicontrol from Dharmacon will be administered at the same dose. After a suitable time point animals will be infected with 10⁷ human parainfluenza type 3. Animals will be killed at different time point after virus infection and lung tissue will be harvested. Real time PCR will be carried out for viral nucleocapsid gene to determine virus replication (5). We will also utilize lung homogenate to determine virus titers using hemagglutination assay described earlier (6). To study the therapeutic value of siRNAs, animals will be first infected with hPIV-3 and then be administered with hPIV specific siRNA and control siRNA at an optimum time point. Virus infection will be monitored from lung tissue by methods described earlier.

### Example 22

### Generation and Testing of siRNAs Derived from hMPV Virus

[0311] Human MPV virus nuclear proteins were identified using the methods above or from publicly available sequences. siRNAs were identified in nucleic acids encoding MPV virus nuclear proteins using the methods described above.

[0312] Table 25 lists 19-nucleotide regions that are siRNA Human Metapneumovirus nucleoprotein target sequences. FIG. 1A demonstrates an alignment of human metapneumovirus nucleoprotein sequences and a consensus sequence derived therefrom. The provided 19 nucleotide region is useful as the sense strand to design a variety of siRNA molecules, optionally having different 3′ overhangs in either or both the sense and antisense strands. Thus, one skilled in the art will appreciate that a variety of sense and antisense siRNA sequences may be obtained from each sequence listed in Table 25.

TABLE 25

Human Metapneumovirus (Accession no. AY297748)

| | | | | |
|---|---|---|---|---|
| 5′ | | | | |
| nucleotide | | SEQ ID | Conserved target | SEQ ID |
| position | Target sequence | NO | sequence | NO |

| | | | | | |
|---|---|---|---|---|---|
| 60 | cuucaagggauucaccuaa | 10885 | 60 | cuucaagggauucaccuaa | 10885 |
| 74 | ccuaagugaucugucauau | 10886 | 74 | ccuaagugaucugucauau | 10886 |
| 75 | cuaagugaucugucauaua | 10887 | 75 | cuaagugaucugucauaua | 10887 |
| 86 | gucauauaaacaugcuaua | 10888 | 86 | gucauauaaacaugcuaua | 10888 |
| 88 | cauauaaacaugcuauauu | 10889 | 88 | cauauaaacaugcuauauu | 10889 |
| 111 | gagucucaauacacaauaa | 10890 | 111 | gagucucaauacacaauaa | 10890 |
| 122 | cacaauaaaaagagaugua | 10891 | 122 | cacaauaaaaagagaugua | 10891 |
| 166 | caucauugcagcaagagau | 10892 | 174 | cagcaagagauaacacuuu | 10894 |
| 173 | gcagcaagagauaacacuu | 10893 | 198 | ggagagauucuuuacacua | 10895 |
| 174 | cagcaagagauaacacuuu | 10894 | 199 | gagagauucuuuacacuaa | 10896 |
| 198 | ggagagauucuuuacacua | 10895 | 214 | cuaaacauacugauuacaa | 10897 |
| 199 | gagagauucuuuacacuaa | 10896 | 230 | caaauaugcugcagagaua | 10898 |
| 214 | cuaaacauacugauuacaa | 10897 | 240 | gcagagauagggauacaau | 10899 |
| 230 | caaauaugcugcagagaua | 10898 | 241 | cagagauagggauacaaua | 10900 |
| 240 | gcagagauagggauacaau | 10899 | 243 | gagauagggauacaauaua | 10901 |
| 241 | cagagauagggauacaaua | 10900 | 245 | gauagggauacaauauauu | 10902 |
| 243 | gagauagggauacaauaua | 10901 | 249 | gggauacaauauauuugca | 10903 |
| 245 | gauagggauacaauauauu | 10902 | 269 | ggcucuaggaucagaaaga | 10904 |
| 249 | gggauacaauauauuugca | 10903 | 280 | cagaaagaguacaacagau | 10905 |
| 269 | ggcucuaggaucagaaaga | 10904 | 282 | gaaagaguacaacagauuu | 10906 |
| 280 | cagaaagaguacaacagau | 10905 | 288 | guacaacagauuuuaagaa | 10907 |
| 282 | gaaagaguacaacagauuu | 10906 | 313 | gcagugaaguucagguggu | 10909 |
| 288 | guacaacagauuuuaagaa | 10907 | 381 | gaguugcaaauguuagaua | 10919 |
| 291 | caacagauuuuaagaaauu | 10908 | 383 | guugcaaauguuagauaua | 10920 |
| 313 | gcagugaaguucagguggu | 10909 | 386 | gcaaauguuagauauacau | 10921 |
| 314 | cagugaaguucaggugguu | 10910 | 396 | gauauacauggaguggaaa | 10922 |
| 341 | gacauacucuuuagggaaa | 10911 | 416 | gaguuggguagaagaaaua | 10924 |
| 347 | cucuuuagggaaagguaaa | 10912 | 421 | ggguagaagaaauagacaa | 10925 |
| 354 | gggaaagguaaaaauagua | 10913 | 422 | gguagaagaaauagacaaa | 10926 |
| 355 | ggaaagguaaaaauaguaa | 10914 | 429 | gaaauagacaaagaggcaa | 10927 |
| 356 | gaaagguaaaaauaguaaa | 10915 | 435 | gacaaagaggcaagaaaaa | 10928 |
| 375 | ggggaagaguugcaaaugu | 10916 | 444 | gcaagaaaaacaaugguga | 10929 |
| 376 | gggaagaguugcaaauguu | 10917 | 454 | caauggugacuuugcuaaa | 10931 |
| 377 | ggaagaguugcaaauguua | 10918 | 467 | gcuaaaggaaucaucaggu | 10933 |
| 381 | gaguugcaaauguuagaua | 10919 | 468 | cuaaaggaaucaucaggua | 10934 |
| 383 | guugcaaauguuagauaua | 10920 | 481 | cagguaacaucccacaaaa | 10935 |
| 386 | gcaaauguuagauauacau | 10921 | 506 | gccuucagcaccagacaca | 10938 |
| 396 | gauauacauggaguggaaa | 10922 | 513 | gcaccagacacaccaauaa | 10939 |
| 410 | ggaaaagaguuggguagaa | 10923 | 514 | caccagacacaccaauaau | 10940 |
| 416 | gaguuggguagaagaaaua | 10924 | 516 | ccagacacaccaauaauuu | 10941 |
| 421 | ggguagaagaaauagacaa | 10925 | 541 | guguaggugcuuuaauauu | 10942 |
| 422 | gguagaagaaauagacaaa | 10926 | 547 | gugcuuuaauauucacuaa | 10943 |
| 429 | gaaauagacaaagaggcaa | 10927 | 562 | cuaaacuagcaucaacaau | 10944 |
| 435 | gacaaagaggcaagaaaaa | 10928 | 588 | ggacuagagacuacaguua | 10945 |
| 444 | gcaagaaaaacaaugguga | 10929 | 663 | ccgaagauugcuagaucuu | 10951 |
| 448 | gaaaaacaauggugacuuu | 10930 | 676 | gaucuuucuaugaacuauu | 10952 |
| 454 | caauggugacuuugcuaaa | 10931 | 705 | guguauuacaggagucuau | 10953 |
| 459 | gugacuuugcuaaaggaau | 10932 | 715 | ggagucuauucauugagua | 10954 |
| 467 | gcuaaaggaaucaucaggu | 10933 | 716 | gagucuauucauugaguau | 10955 |
| 468 | cuaaaggaaucaucaggua | 10934 | 735 | gggaaagcuuuaggcucau | 10956 |
| 481 | cagguaacaucccacaaaa | 10935 | 741 | gcuuuaggcucaucuucaa | 10957 |
| 492 | ccacaaaaccagaggccuu | 10936 | 747 | ggcucaucuucaacaggaa | 10958 |
| 500 | ccagaggccuucagcacca | 10937 | 763 | gaagcaaagcagaaaguuu | 10959 |
| 506 | gccuucagcaccagacaca | 10938 | 774 | gaaaguuuguuuguaaaua | 10963 |
| 513 | gcaccagacacaccaauaa | 10939 | 778 | guuuguuuguaaauauauu | 10964 |
| 514 | caccagacacaccaauaau | 10940 | 816 | ggucaaacaaugcuaaggu | 10966 |
| 516 | ccagacacaccaauaauuu | 10941 | 836 | gggugucauugccagauca | 10967 |
| 541 | guguaggugcuuuaauauu | 10942 | 846 | gccagaucaucuaacaaca | 10968 |
| 547 | gugcuuuaauauucacuaa | 10943 | 847 | ccagaucaucuaacaacau | 10969 |
| 562 | cuaaacuagcaucaacaau | 10944 | 850 | gaucaucuaacaacauaau | 10971 |
| 588 | ggacuagagacuacaguua | 10945 | 860 | caacauaaugcuaggacau | 10972 |
| 623 | gcuaagugaugcgcucaaa | 10946 | 883 | cugugcaagcugaauugaa | 10973 |
| 628 | gugaugcgcucaaaagaua | 10947 | 891 | gcugaauugaagcaaguua | 10974 |
| 638 | caaaagauacccuagggua | 10948 | 953 | gcuuuuacaucuaagacaa | 10979 |
| 652 | ggguagauauaccgaagau | 10949 | 1038 | gcuucaggucuagguauaa | 10980 |
| 657 | gauauaccgaagauugcua | 10950 | 1091 | gcuauuuucugcagcagaa | 10982 |
| 663 | ccgaagauugcuagaucuu | 10951 | 1104 | gcagaaaguuaugccagaa | 10983 |
| 676 | gaucuuucuaugaacuauu | 10952 | 1116 | gccagaagcuuaaaagaaa | 10984 |
| 705 | guguauuacaggagucuau | 10953 | 1123 | gcuuaaaagaaagcaacaa | 10985 |
| 715 | ggagucuauucauugagua | 10954 | 1163 | gcucacagacgaagaaaaa | 10986 |
| 716 | gagucuauucauugaguau | 10955 | | | |
| 735 | gggaaagcuuuaggcucau | 10956 | | | |
| 741 | gcuuuaggcucaucuucaa | 10957 | | | |
| 747 | ggcucaucuucaacaggaa | 10958 | | | |
| 763 | gaagcaaagcagaaaguuu | 10959 | | | |
| 767 | caaagcagaaaguuuguuu | 10960 | | | |
| 771 | gcagaaaguuuguuuguaa | 10961 | | | |
| 772 | cagaaaguuuguuuguaaa | 10962 | | | |
| 774 | gaaaguuuguuuguaaaua | 10963 | | | |
| 778 | guuuguuuguaaauauauu | 10964 | | | |
| 804 | gcuuauggagccggucaaa | 10965 | | | |
| 816 | ggucaaacaaugcuaaggu | 10966 | | | |
| 836 | gggugucauugccagauca | 10967 | | | |
| 846 | gccagaucaucuaacaaca | 10968 | | | |
| 847 | ccagaucaucuaacaacau | 10969 | | | |
| 848 | cagaucaucuaacaacaua | 10970 | | | |
| 850 | gaucaucuaacaacauaau | 10971 | | | |
| 860 | caacauaaugcuaggacau | 10972 | | | |
| 883 | cugugcaagcugaauugaa | 10973 | | | |
| 891 | gcugaauugaagcaaguua | 10974 | | | |
| 899 | gaagcaaguuacagagguu | 10975 | | | |
| 906 | guuacagagguuuaugauu | 10976 | | | |
| 914 | gguuuaugauuuggugaga | 10977 | | | |
| 939 | gguccugaaucugggcuuu | 10978 | | | |
| 953 | gcuuuuacaucuaagacaa | 10979 | | | |
| 1038 | gcuucaggucuagguauaa | 10980 | | | |
| 1044 | ggucuagguauaaucggaa | 10981 | | | |
| 1091 | gcuauuuucugcagcagaa | 10982 | | | |
| 1104 | gcagaaaguuaugccagaa | 10983 | | | |
| 1116 | gccagaagcuuaaaagaaa | 10984 | | | |
| 1123 | gcuuaaaagaaagcaacaa | 10985 | | | |
| 1163 | gcucacagacgaagaaaaa | 10986 | | | |

### In Vitro Analysis

[0313] Monkey kidney epithelial cell line LLC-MK2 cells will be infected with hMPV at predetermined multiplicity of infection (MOI) at a suitable time point either after or before electroporation with different concentration of siRNAs. Sicontrol from Dharmacon will be used as control siRNA. At a suitable time point cells will be harvested and total RNA will be isolated. Oligo dT will be used as primer to synthesize the first strand cDNA by reverse transcription. Real time PCR will be then carried out following method described by Boivin et al. (1) using virus target gene specific primer to determine the silencing effect of siRNA. Virus non-target gene specific primer (eg. Polymerase) will be also used in real time PCR to measure the reduction of virus replication. Virus titers will be determined in a viral plaque assay following method described by Tripp et al. (2)

### In Vivo Analysis

[0314] Balb/c mice under anesthesia will be administered intranasally with 2-10 mg/kg dose of modified or unmodified siRNA with or without formulation. Sicontrol from Dharmacon will be administered at the same dose. After a suitable time point animals will be infected with 10⁶ human metapneumovirus. Animals will be killed at different time point after virus infection and lung tissue will be harvested. Real time PCR will be carried out for N gene to determine virus replication as described in in vitro assay (1). We will also utilize lung homogenate to determine virus titers in a plaque assay using LLC-MK2 cells (16). To study the therapeutic value of siRNAs, animals will be first infected with hMPV and then be administered with hMPV specific siRNA and control siRNA at a optimum time point. Virus infection will be monitored from lung tissue by methods described earlier.

### Example 23

### Generation and Testing of siRNAs Derived from RSV Virus

[0315] RSV virus nuclear proteins were identified using the methods above or from publicly available sequences. siRNAs were identified in nucleic acids encoding RSV virus nuclear proteins using the methods described in Example 2.

[0316] Table 26 lists 19-nucleotide regions that are siRNA Human Respiratory syncytial virus nucleoprotein target sequences. The provided 19 nucleotide region is useful as the sense strand to design a variety of siRNA molecules, optionally having different 3′ overhangs in either or both the sense and antisense strands. Thus, one skilled in the art will appreciate that a variety of sense and antisense siRNA sequences may be obtained from each sequence listed in Table 26.

TABLE 26

Human Respiratory syncytial virus (Accession no. NC_001781)

| 5′ | | | | | |
|---|---|---|---|---|---|
| nucleotide | | SEQ ID | | Conserved target | SEQ ID |
| position | Target sequence | NO | | sequence | NO |
| 1246 | ccaauuaugaugugcaaaa | 10987 | 1246 | ccaauuaugaugugcaaaa | 10987 |
| 1259 | gcaaaaacaccuaaacaaa | 10988 | 1289 | gcuauuaaucacugaagau | 10989 |
| 1289 | gcuauuaaucacugaagau | 10989 | 1326 | ggauuaauagguauguuau | 10991 |
| 1313 | ucauaaauucacaggauua | 10990 | 1347 | gcuauguccagguuaggaa | 10992 |
| 1326 | ggauuaauagguauguuau | 10991 | 1362 | ggaagggaagacacuauaa | 10993 |
| 1347 | gcuauguccagguuaggaa | 10992 | 1385 | acuuaaagaugcuggauau | 10996 |
| 1362 | ggaagggaagacacuauaa | 10993 | 1398 | ggauaucauguuaaagcua | 10997 |
| 1366 | gggaagacacuauaaagau | 10994 | 1419 | ggaguagauauaacaacau | 11000 |
| 1367 | ggaagacacuauaaagaua | 10995 | 1440 | cgucaagauauaaauggaa | 11001 |
| 1385 | acuuaaagaugcuggauau | 10996 | 1460 | ggaaaugaaauucgaagua | 11004 |
| 1398 | ggauaucauguuaaagcua | 10997 | 1540 | ccuacaaaaaaaugcuaaa | 11005 |
| 1406 | uguuaaagcuaauggagua | 10998 | 1566 | ggagaaguggcuccagaau | 11008 |
| 1413 | gcuaauggaguagauauaa | 10999 | 1578 | ccagaauauaggcaugauu | 11009 |
| 1419 | ggaguagauauaacaacau | 11000 | 1599 | ccagacugugggaugauaa | 11010 |
| 1440 | cgucaagauauaaauggaa | 11001 | 1632 | gcacuuguaauaaccaaau | 11012 |
| 1445 | agauauaaauggaaaggaa | 11002 | 1659 | ggagacagaucaggucuua | 11013 |
| 1446 | gauauaaauggaaaggaaa | 11003 | 1695 | gcaaacaaugucuuaaaaa | 11016 |
| 1460 | ggaaaugaaauucgaagua | 11004 | 1811 | gcacuuuggcauugcacaa | 11019 |
| 1540 | ccuacaaaaaaaugcuaaa | 11005 | 1845 | gguaguagaguugaaggaa | 11020 |
| 1553 | gcuaaaagagaugggagaa | 11006 | 1929 | gccaaaucuguaaaaaaua | 11023 |
| 1565 | gggagaaguggcuccagaa | 11007 | 1930 | ccaaaucuguaaaaaauau | 11024 |
| 1566 | ggagaaguggcuccagaau | 11008 | 1962 | gcuaguguccaggcagaaa | 11025 |
| 1578 | ccagaauauaggcaugauu | 11009 | 2121 | gcagcaggucuaggcauaa | 11028 |
| 1599 | ccagacugugggaugauaa | 11010 | 2132 | aggcauaaugggagaguau | 11029 |
| 1609 | ggaugauaauacuguguau | 11011 | 2199 | gcagagcaacucaaagaaa | 11031 |
| 1632 | gcacuuguaauaaccaaau | 11012 | 2223 | guaauaaacuacaguguau | 11033 |
| 1659 | ggagacagaucaggucuua | 11013 | 2288 | cccuaaagaagaugaugua | 11035 |
| 1680 | gcaguaauuaggagggcaa | 11014 | | | |
| 1693 | gggcaaacaaugucuuaaa | 11015 | | | |
| 1695 | gcaaacaaugucuuaaaaa | 11016 | | | |
| 1734 | ggucucauaccaaaggaua | 11017 | | | |
| 1748 | ggauauagcuaacaguuuu | 11018 | | | |
| 1811 | gcacuuuggcauugcacaa | 11019 | | | |
| 1845 | gguaguagaguugaaggaa | 11020 | | | |
| 1899 | gggcaaguaaugcuaagau | 11021 | | | |
| 1910 | gcuaagauggggaguuuua | 11022 | | | |
| 1929 | gccaaaucuguaaaaaaua | 11023 | | | |
| 1930 | ccaaaucuguaaaaaauau | 11024 | | | |
| 1962 | gcuaguguccaggcagaaa | 11025 | | | |
| 1985 | gcaaguuguggaagucuau | 11026 | | | |
| 2064 | gcaucauugcugucauuaa | 11027 | | | |
| 2121 | gcagcaggucuaggcauaa | 11028 | | | |
| 2132 | aggcauaaugggagaguau | 11029 | | | |
| 2160 | ccaagaaaccaggaucuuu | 11030 | | | |
| 2199 | gcagagcaacucaaagaaa | 11031 | | | |
| 2210 | caaagaaaauggaguaaua | 11032 | | | |
| 2223 | guaauaaacuacaguguau | 11033 | | | |
| 2269 | ccauaaagaaucaacucaa | 11034 | | | |
| 2288 | cccuaaagaagaugaugua | 11035 | | | |
| 2309 | gcuuuaaguuaacaaaaaa | 11036 | | | |

### In Vitro Analysis

[0317] Lung epithelial cell line A549 cells will be transfected with different concentration of siRNAs (3). Sicontrol from Dharmacon will be used as control siRNA. Lipofectamine 2000 will be used as transfection reagent and manufacturer's instruction will be followed. 4 hours later, transfected A549 cells will be infected with hRSV. At a suitable time point cells will be harvested and RNA will be isolated. The RT and real time PCR will be performed as described above. The culture supernatant from siRNA transfected and RSV infected cells will be serially diluted and the dilution will be used to infect A549 cells to determine virus titers in a viral plaque assay (4). A549 cells will also be first infected with RSV and transfected with different concentrations of siRNAs at a suitable time point. At a suitable time point cells will be harvested and RNA will be isolated. The RT and real time PCR will be performed with gene specific primer as described above to determine the silencing effect of siRNA. Virus non-target gene specific primer (eg. Polymerase) will also be also used in real time PCR to measure the reduction of virus replication.

### In Vivo Analysis

[0318] Balb/c mice will be under isofluorane anesthesia and be intranasally administered NP-specific, RSV-specific siRNA in PBS at 2 mg/kg, 50 ul per mouse. sicontrol from Dharmacon will be administered at the same dose in PBS. 4 days post-infection, the mouse lung will be harvested and homogenized. 10-fold serial dilution of lung homogenate will be used to infect A549 cells. Cytopathic effect will be monitored 3 to 5 days after infection (4). The dilution at which 50% of wells showed cytopathic effect will be determined as TCID₅₀. To study the therapeutic value of siRNAs, animals will be first infected with RSV and then be administered with RSV specific siRNA and control siRNA at a optimum time point. Virus infection will be monitored from lung tissue by methods described earlier.

### Example 24

### Generation and Testing of siRNAs Derived from Coronavirus

[0319] Coronavirus nuclear proteins were identified using the methods above or from publicly available sequences. siRNAs were identified in nucleic acids encoding coronavirus virus nuclear proteins using the methods described above.

[0320] Table 27 lists 19-nucleotide regions that are siRNA Human Coronavirus nucleoprotein target sequences. The provided 19 nucleotide region is useful as the sense strand to design a variety of siRNA molecules, optionally having different 3′ overhangs in either or both the sense and antisense strands. Thus, one skilled in the art will appreciate that a variety of sense and antisense siRNA sequences may be obtained from each sequence listed in Table 27.

TABLE 27

human corona virus (accession no. AY391777)

| 5′ | | | 5′ | | |
|---|---|---|---|---|---|
| nucleotide | | SEQ ID | nucleotide | Conserved target | SEQ ID |
| position | Target sequence | NO | position | sequence | NO |
| 29119 | gguaagcaauccaguagua | 11037 | 29119 | gguaagcaauccaguagua | 11037 |
| 29259 | gcaaccaucaggagggaau | 11038 | 29259 | gcaaccaucaggagggaau | 11038 |
| 29305 | ggaauuacucaguuucaaa | 11039 | 29305 | ggaauuacucaguuucaaa | 11039 |
| 29325 | gggaaaggaguuugaguuu | 11040 | 29325 | gggaaaggaguuugaguuu | 11040 |
| 29642 | cgguacucccucaggguua | 11041 | 29642 | cgguacucccucaggguua | 11041 |
| 29686 | gcuccuaauuccagaucua | 11042 | 29686 | gcuccuaauuccagaucua | 11042 |
| 29879 | ccaaagaagucagacagaa | 11043 | 29879 | ccaaagaagucagacagaa | 11043 |
| 29880 | caaagaagucagacagaaa | 11044 | 29880 | caaagaagucagacagaaa | 11044 |

[0321] Lung epithelial cell line A549 cells will be transfected with different concentration of siRNAs. Sicontrol from Dharmacon will be used as control siRNA. Lipofectamine 2000 will be used as transfection reagent and manufacturer's instruction will be followed. 4 hours later, transfected A549 cells will be infected with coronavirus. At a suitable time point cells will be harvested and RNA will be isolated. The RT and real time PCR will be performed as described before (8). The culture supernatant from siRNA transfected and coronavirus infected cells will be collected. Hemagglutination assay will be performed by mixing 2-fold serial dilution of supernatant will with 0.05% chicken red blood cells (9). A549 cells will also be first infected with human coronavirus and then transfected with different concentrations of siRNAs at a suitable time point. At an optimized time point cells will be harvested and supernatant collected. RNA will be isolated from cells and RT and real time PCR will be performed with gene specific primer as described above to determine the silencing effect of siRNA. Hemagglutination assay described above as well as virus non-target gene specific primer (eg. Polymerase) will be used in real time PCR to measure the reduction of virus replication.

### Example 25

### Generation and Testing of siRNAs Derived from West Nile Virus

[0322] West Nile virus nuclear proteins were identified using the methods above or from publicly available sequences. siRNAs were identified in nucleic acids encoding West Nile virus nuclear proteins using the methods described above.

[0323] Table 28 lists 19-nucleotide regions that are siRNA Human West Nile virus nucleoprotein target sequences. The provided 19 nucleotide region is useful as the sense strand to design a variety of siRNA molecules, optionally having different 3′ overhangs in either or both the sense and antisense strands. Thus, one skilled in the art will appreciate that a variety of sense and antisense siRNA sequences may be obtained from each sequence listed in Table 28.

TABLE 28

West Nile virus (accession no. AY842931)

| | | | | | |
|---|---|---|---|---|---|
| 5′ | | | 5′ | | |
| nucleotide | | SEQ ID | nucleotide | Conserved target | SEQ ID |
| position | Target sequence | NO | position | sequence | NO |

| | | | | | |
|---|---|---|---|---|---|
| 98 | cuauguugagccugaucga | 11045 | 98 | cuauguugagccugaucga | 11045 |
| 158 | ucuucagguucacagcaau | 11046 | 158 | ucuucagguucacagcaau | 11046 |
| 162 | cagguucacagcaauugcu | 11047 | 162 | cagguucacagcaauugcu | 11047 |
| 192 | agugcuggaucgauggaga | 11048 | 199 | gaucgauggagagguguga | 11049 |
| 199 | gaucgauggagagguguga | 11049 | 203 | gauggagaggugugaacaa | 11050 |
| 203 | gauggagaggugugaacaa | 11050 | 206 | ggagaggugugaacaaaca | 11051 |
| 206 | ggagaggugugaacaaaca | 11051 | 219 | caaacaaacagcgaugaaa | 11052 |
| 219 | caaacaaacagcgaugaaa | 11052 | 220 | aaacaaacagcgaugaaac | 11053 |
| 220 | aaacaaacagcgaugaaac | 11053 | 221 | aacaaacagcgaugaaaca | 11054 |
| 221 | aacaaacagcgaugaaaca | 11054 | 223 | caaacagcgaugaaacacc | 11055 |
| 223 | caaacagcgaugaaacacc | 11055 | 224 | aaacagcgaugaaacaccu | 11056 |
| 224 | aaacagcgaugaaacaccu | 11056 | 227 | cagcgaugaaacaccuucu | 11057 |
| 227 | cagcgaugaaacaccuucu | 11057 | 229 | gcgaugaaacaccuucuga | 11058 |
| 229 | gcgaugaaacaccuucuga | 11058 | 230 | cgaugaaacaccuucugag | 11059 |
| 230 | cgaugaaacaccuucugag | 11059 | 231 | gaugaaacaccuucugagu | 11060 |
| 231 | gaugaaacaccuucugagu | 11060 | 238 | caccuucugaguuuuaaga | 11061 |
| 238 | caccuucugaguuuuaaga | 11061 | 256 | aaggaacuagggaccuuga | 11063 |
| 252 | uaagaaggaacuagggacc | 11062 | 259 | gaacuagggaccuugacca | 11064 |
| 256 | aaggaacuagggaccuuga | 11063 | 265 | gggaccuugaccagugcua | 11065 |
| 259 | gaacuagggaccuugacca | 11064 | 266 | ggaccuugaccagugcuau | 11066 |
| 265 | gggaccuugaccagugcua | 11065 | 270 | cuugaccagugcuaucaau | 11067 |
| 266 | ggaccuugaccagugcuau | 11066 | 289 | cggcggagcucaaaacaaa | 11068 |
| 270 | cuugaccagugcuaucaau | 11067 | 292 | cggagcucaaaacaaaaga | 11069 |
| 289 | cggcggagcucaaaacaaa | 11068 | 293 | ggagcucaaaacaaaagaa | 11070 |
| 292 | cggagcucaaaacaaaaga | 11069 | 294 | gagcucaaaacaaaagaaa | 11071 |
| 293 | ggagcucaaaacaaaagaa | 11070 | | | |
| 294 | gagcucaaaacaaaagaaa | 11071 | | | |

### In Vitro Analysis

[0324] For virus stock production, Vero cells will be infected with West Nile virus (WNV) strains obtained from ATCC or CDC at a multiplicity of infection of 0.1-1 and cultured in medium supplemented with 2% FBS. Culture supernatant will be harvested and clarified at 72-96 hour post-infection when 50-70% of cells show cytopathic effects (CPE). The concentration of infectious virus in stocks will be determined by titration on Vero cells in 96-well plates and calculated as ID₅₀ per ml. One ID₅₀ is equivalent to 1 infectious unit (i.u.).

[0325] To find out most potent siRNA sequence we will first transfect/electroporate Vero cells or any other suitable cell line such as baby hamster kidney (BHK) cell line (BHK-21) with different concentrations of a number of siRNAs. Sicontrol from Dharmacon will be used as control siRNA. After a suitable time point following transfection/electroporation cells will be infected with an optimized moi of west nile virus. Cells will be harvested and supernatant collected at different time point post infection. For assessment of the effect of siRNA on virus infection/replication RNA will be isolated from cells and reverse transcribed to make the first strand of cDNA. Real time PCR will be carried out (10) for WNV N gene using N gene specific primers and amplified products will be compared to controls to assess effect of siRNA. Culture supernatants will also be tested in a virus titer assay using published protocols (11). Vero or BHK-21 cells will also be first infected with WNV and transfected with different concentrations of siRNAs at a suitable time point. At a suitable time point cells will be harvested and RNA will be isolated. The RT and real time PCR will be performed with gene specific primer as described above to determine the silencing effect of siRNA. Virus non-target gene specific primer (eg. Polymerase) will also be also used in real time PCR to measure the reduction of virus replication. Virus titer will be assayed using method described above.

### In Vivo Analysis

[0326] BALB/c mice has been shown to support the WNV replication efficiently. We plan to utilize this strain to evaluate siRNAs found potent in cell culture assay. Specifically we will administer mice 2-10 mg/kg dose of modified or unmodified siRNA with or without formulation intravenously. Sicontrol from Dharmacon will be administered at the same dose. After a suitable time point animals will be infected with WNV. Brain tissue and blood will be collected from these animals at different time point and virus levels in blood and brains will be determined by plaque titration on Vero or BHK-21 cells (11). Apart from this prophylaxis method we also plan to do a therapeutic model where animals will be infected first with the virus and then given siRNA therapy. Virus infection will be monitored in blood and brain tissue by methods described earlier.

### Example 26

### Generation and Testing of siRNAs Derived from Dengue Virus

[0327] Dengue virus nuclear proteins were identified using the methods above or from publicly available sequences. siRNAs were identified in nucleic acids encoding Dengue virus nuclear proteins using the methods described above.

[0328] Table 29 lists 19-nucleotide regions that are siRNA dengue virus nucleoprotein target sequences. The provided 19 nucleotide region is useful as the sense strand to design a variety of siRNA molecules, optionally having different 3′ overhangs in either or both the sense and antisense strands. Thus, one skilled in the art will appreciate that a variety of sense and antisense siRNA sequences may be obtained from each sequence listed in Table 29.

TABLE 29

Dengue virus type 2 (accession no. NC_001474)

| | | | | | |
|---|---|---|---|---|---|
| 5′ | | | 5′ | | |
| nucleotide | | SEQ ID | nucleotide | Conserved target | SEQ ID |
| position | Target sequence | NO | position | sequence | NO |

| | | | | | |
|---|---|---|---|---|---|
| 96 | gaugaaugaccaacggaaa | 11072 | 96 | gaugaaugaccaacggaaa | 11072 |
| 109 | cggaaaaaggcgagaaaca | 11073 | 109 | cggaaaaaggcgagaaaca | 11073 |
| 119 | cgagaaacacgccuuucaa | 11074 | 119 | cgagaaacacgccuuucaa | 11074 |
| 150 | cgagagaaaccgcguguca | 11075 | 170 | cuguacaacaguugacaaa | 11077 |
| 159 | ccgcgugucaacuguacaa | 11076 | 210 | gcagggacgaggaccacua | 11078 |
| 170 | cuguacaacaguugacaaa | 11077 | 213 | gggacgaggaccacuaaaa | 11079 |
| 210 | gcagggacgaggaccacua | 11078 | 273 | cccaccaacagcagggaua | 11080 |
| 213 | gggacgaggaccacuaaaa | 11079 | 274 | ccaccaacagcagggauau | 11081 |
| 273 | cccaccaacagcagggaua | 11080 | 277 | ccaacagcagggauauuaa | 11082 |
| 274 | ccaccaacagcagggauau | 11081 | 303 | gggaacaauuaaaaaauca | 11083 |
| 277 | ccaacagcagggauauuaa | 11082 | 304 | ggaacaauuaaaaaaucaa | 11084 |
| 303 | gggaacaauuaaaaaauca | 11083 | 350 | ggaaagagauuggaaggau | 11085 |
| 304 | ggaacaauuaaaaaaucaa | 11084 | 404 | gcaugaucaucaugcugau | 11086 |
| 350 | ggaaagagauuggaaggau | 11085 | | | |
| 404 | gcaugaucaucaugcugau | 11086 | | | |

### In Vitro Analysis

[0329] (DEN1-4) will be propagated in C6/36 mosquito cell line. To test siRNA efficiency in silencing the gene, we will transfect/electroporate Vero cells with different concentrations of a number of siRNAs. Sicontrol from Dharmacon will be used as control siRNA. After a suitable time point following transfection/electroporation cells will be infected with an optimized moi of dengue virus (DEN1-4). Cells will be harvested and supernatant collected at different time point post infection. For assessment of the effect of siRNA on virus infection/replication RNA will be isolated from cells and reverse transcribed to make the first strand of cDNA. Real time PCR will be carried out for the dengue nucleocapsid/capsid gene using gene specific primers and amplified products will be compared to non-siRNA transfected infected controls to assess effect of siRNA (1). Virus non-target gene specific primer (eg. preM) will also be also used in real time PCR to measure the reduction of virus replication. Culture supernatants will also be tested in a virus titer assay using Vero cells or BHK-21 cells (12) to determine virus titers. We will also test the effect of these siRNAs in virus infection/replication following DEN infection of Vero cells by methods described above.

### In Vivo Analysis

[0330] For in vivo evaluation of siRNAs, A/J mice which has been shown to be more susceptible to dengue type 2 (DEN2) infection will be used. Mice will be administered with 2-10 mg/kg dose of modified or unmodified siRNA with or without formulation intravenously. Sicontrol from Dharmacon will be administered at the same dose. After a suitable time point animals will be infected with DEN-2 virus intravenously (1×10⁸ p.f.u. per mouse). The effect of siRNA on dengue-2 virus will be detected by real time PCR analysis with dengue-virus-specific primers from RNA extracted from blood (16). We will also perform viral plaque assay from these samples using Vero cells (12). Apart from this prophylaxis method we also plan to do a therapeutic model where animals will be infected first with the virus and then given siRNA therapy. Virus infection will be monitored from brain tissue by methods described earlier.

### Example 27

### Generation and Testing of siRNAs Derived from Rhinovirus

[0331] Rhinovirus nuclear proteins were identified using the methods above or from publicly available sequences. siRNAs were identified in nucleic acids encoding Rhinovirus nuclear proteins using the methods described above

[0332] Table 30 lists 19-nucleotide regions that are siRNA rhinovirus-16 nucleoprotein target sequences. The provided 19 nucleotide region is useful as the sense strand to design a variety of siRNA molecules, optionally having different 3′ overhangs in either or both the sense and antisense strands. Thus, one skilled in the art will appreciate that a variety of sense and antisense siRNA sequences may be obtained from each sequence listed in Table 30.

TABLE 30

Rhinovirus-16 (accession no. L24917 (Capsid))

| | | | | | |
|---|---|---|---|---|---|
| 5′ | | | 5′ | | |
| nucleotide | | SEQ ID | nucleotide | Conserved target | SEQ ID |
| position | Target sequence | NO | position | sequence | NO |

| | | | | | |
|---|---|---|---|---|---|
| 630 | gcgcucaaguaucuagaca | 11087 | 630 | gcgcucaaguaucuagaca | 11087 |
| 632 | gcucaaguaucuagacaga | 11088 | 632 | gcucaaguaucuagacaga | 11088 |
| 656 | gguacgcacucaacacaaa | 11089 | 656 | gguacgcacucaacacaaa | 11089 |
| 669 | cacaaaauauggugucaaa | 11090 | 689 | ggauccagccucaauuauu | 11091 |
| 689 | ggauccagccucaauuauu | 11091 | 697 | ccucaauuauuuuaacauu | 11092 |
| 697 | ccucaauuauuuuaacauu | 11092 | 840 | guguagaagcuuguggaua | 11095 |
| 808 | ggagaaaggcauacccacu | 11093 | 848 | gcuuguggauacucugaua | 11096 |
| 829 | gcaaucuccaaguguagaa | 11094 | 852 | guggauacucugauagaau | 11097 |
| 840 | guguagaagcuuguggaua | 11095 | 854 | ggauacucugauagaauaa | 11098 |
| 848 | gcuuguggauacucugaua | 11096 | 861 | cugauagaauaauccaaau | 11099 |
| 852 | guggauacucugauagaau | 11097 | 863 | gauagaauaauccaaauua | 11100 |
| 854 | ggauacucugauagaauaa | 11098 | 898 | cauaacaucucaagauguu | 11101 |
| 861 | cugauagaauaauccaaau | 11099 | 903 | caucucaagauguugcuaa | 11102 |
| 863 | gauagaauaauccaaauua | 11100 | 964 | gcaggaugcaacggcuaua | 11105 |
| 898 | cauaacaucucaagauguu | 11101 | 998 | ccagauacaucaucaaaua | 11106 |
| 903 | caucucaagauguugcuaa | 11102 | 1079 | ccagaugcucuuaaagaca | 11107 |
| 918 | cuaaugcagugguugggua | 11103 | 1085 | gcucuuaaagacaugggua | 11108 |
| 962 | ccgcaggaugcaacggcua | 11104 | 1086 | cucuuaaagacauggguau | 11109 |
| 964 | gcaggaugcaacggcuaua | 11105 | 1088 | cuuaaagacauggguauuu | 11110 |
| 998 | ccagauacaucaucaaaua | 11106 | 1099 | ggguauuuuuggugaaaau | 11111 |
| 1079 | ccagaugcucuuaaagaca | 11107 | 1152 | cagugcacguacagugcaa | 11113 |
| 1085 | gcucuuaaagacaugggua | 11108 | 1214 | ccagaacaccaguuagcua | 11117 |
| 1086 | cucuuaaagacauggguau | 11109 | 1321 | gaaacaaccuagugaugau | 11125 |
| 1088 | cuuaaagacauggguauuu | 11110 | 1334 | gaugauaauuggcuaaauu | 11126 |
| 1099 | ggguauuuuuggugaaaau | 11111 | 1345 | gcuaaauuuugaugguaca | 11127 |
| 1135 | ggguagaagugguuauaca | 11112 | 1358 | gguacauuauugggcaauu | 11128 |
| 1152 | cagugcacguacagugcaa | 11113 | 1359 | guacauuauugggcaauuu | 11129 |
| 1183 | ccaccaggguacacuacua | 11114 | 1457 | ccaauggauucuaugguua | 11130 |
| 1189 | ggguacacuacuagugguu | 11115 | 1483 | caauuggaguuugguaaua | 11132 |
| 1191 | guacacuacuagugguuau | 11116 | 1657 | gacaacagaugauaugcaa | 11142 |
| 1214 | ccagaacaccaguuagcua | 11117 | 1703 | ccaacaaaagagaucuuua | 11143 |
| 1222 | ccaguuagcuacaguaaau | 11118 | 1725 | caggagagguuaagaacuu | 11145 |
| 1225 | guuagcuacaguaaauaaa | 11119 | 1733 | guuaagaacuugauugaaa | 11146 |
| 1229 | gcuacaguaaauaaaggua | 11120 | 1748 | gaaaugugucagguggaua | 11147 |
| 1230 | cuacaguaaauaaagguaa | 11121 | 1760 | guggauacacucauaccaa | 11148 |
| 1235 | guaaauaaagguaauguua | 11122 | 1916 | gagauagcaaguuacuuua | 11154 |
| 1245 | guaauguuaaugcagguua | 11123 | 1922 | gcaaguuacuuuacacacu | 11155 |
| 1300 | ggguacacaaguugaaaau | 11124 | 1941 | ggacagggagccugcgauu | 11156 |
| 1321 | gaaacaaccuagugaugau | 11125 | 1954 | gcgauucaguuucauguuu | 11157 |
| 1334 | gaugauaauuggcuaaauu | 11126 | 1980 | cugcaaacacuaccuuaaa | 11158 |
| 1345 | gcuaaauuuugaugguaca | 11127 | 2024 | gggauugguaagccuagaa | 11159 |
| 1358 | gguacauuauugggcaauu | 11128 | 2035 | gccuagaaguagaaaggaa | 11161 |
| 1359 | guacauuauugggcaauuu | 11129 | 2040 | gaaguagaaaggaagcaau | 11162 |
| 1457 | ccaauggauucuaugguua | 11130 | 2043 | guagaaaggaagcaauguu | 11163 |
| 1463 | gauucuaugguuagacaua | 11131 | 2064 | ggacacacgugguguggga | 11165 |
| 1483 | caauuggaguuugguaaua | 11132 | 2074 | ggugugggauguagguuua | 11166 |
| 1495 | gguaauaauaccaguuugu | 11133 | 2122 | gaucagugccagucaguau | 11168 |
| 1514 | caacuacaaagcaacaaua | 11134 | 2176 | cuacauuacaugcugguau | 11169 |
| 1517 | cuacaaagcaacaauauau | 11135 | 2289 | gagacacagaccugcacaa | 11171 |
| 1524 | gcaacaauauauccaacau | 11136 | 2338 | ggaaagauauguagaugaa | 11175 |
| 1525 | caacaauauauccaacauu | 11137 | 2356 | agucuuaaaugaaguguua | 11176 |
| 1566 | gcccaaugugugcugaauu | 11138 | 2441 | gaaacaggacauaccaaua | 11178 |
| 1585 | cucuggagcacgugccaaa | 11139 | 2515 | ggaugaaaugaguguggaa | 11183 |
| 1610 | gugcaaggucuaccaguau | 11140 | 2516 | gaugaaaugaguguggaaa | 11184 |
| 1612 | gcaaggucuaccaguauau | 11141 | 2530 | ggaaagcuuccuaggcaga | 11185 |
| 1657 | gacaacagaugauaugcaa | 11142 | 2629 | gcaagaaauggcacaaauu | 11192 |
| 1703 | ccaacaaaagagaucuuua | 11143 | 2630 | caagaaauggcacaaauua | 11193 |
| 1717 | cuuuauaccaggagagguu | 11144 | 2638 | ggcacaaauuagaagaaaa | 11194 |
| 1725 | caggagagguuaagaacuu | 11145 | 2639 | gcacaaauuagaagaaaau | 11195 |
| 1733 | guuaagaacuugauugaaa | 11146 | 2675 | gcaagauuugacucugaaa | 11197 |
| 1748 | gaaaugugucagguggaua | 11147 | 2804 | gcuuggcaaucuggaacaa | 11203 |
| 1760 | guggauacacucauaccaa | 11148 | 2816 | ggaacaaaugcaucuguau | 11204 |
| 1762 | ggauacacucauaccaaua | 11149 | 2817 | gaacaaaugcaucuguauu | 11205 |
| 1842 | caaaauuagcugaagaaau | 11150 | 2881 | gaguauugcaucagcauau | 11206 |
| 1851 | cugaagaaauuuuugcaau | 11151 | 2892 | cagcauauuacauguuuua | 11207 |
| 1853 | gaagaaauuuuugcaauua | 11152 | 2961 | ccaaugacaugggaacuuu | 11210 |
| 1899 | ccacaacccucauugguga | 11153 | 3033 | ggauauaucacaaagccaa | 11217 |
| 1916 | gagauagcaaguuacuuua | 11154 | 3034 | gauauaucacaaagccaaa | 11218 |
| 1922 | gcaaguuacuuuacacacu | 11155 | 3047 | gccaaacacaccaaagcuu | 11219 |
| 1941 | ggacagggagccugcgauu | 11156 | | | |
| 1954 | gcgauucaguuucauguuu | 11157 | | | |
| 1980 | cugcaaacacuaccuuaaa | 11158 | | | |
| 2024 | gggauugguaagccuagaa | 11159 | | | |
| 2030 | gguaagccuagaaguagaa | 11160 | | | |
| 2035 | gccuagaaguagaaaggaa | 11161 | | | |
| 2040 | gaaguagaaaggaagcaau | 11162 | | | |
| 2043 | guagaaaggaagcaauguu | 11163 | | | |
| 2050 | ggaagcaauguuagggaca | 11164 | | | |
| 2064 | ggacacacgugguguggga | 11165 | | | |
| 2074 | ggugugggauguagguuua | 11166 | | | |
| 2080 | ggauguagguuuacaaucu | 11167 | | | |
| 2122 | gaucagugccagucaguau | 11168 | | | |
| 2176 | cuacauuacaugcugguau | 11169 | | | |
| 2232 | cugcugagauguuguguuu | 11170 | | | |
| 2289 | gagacacagaccugcacaa | 11171 | | | |
| 2302 | gcacaagcaaacaggacca | 11172 | | | |
| 2305 | caagcaaacaggaccaaua | 11173 | | | |
| 2308 | gcaaacaggaccaauaaca | 11174 | | | |
| 2338 | ggaaagauauguagaugaa | 11175 | | | |
| 2356 | agucuuaaaugaaguguua | 11176 | | | |
| 2382 | ccaauauuaaucagagcca | 11177 | | | |
| 2441 | gaaacaggacauaccaaua | 11178 | | | |
| 2454 | ccaauaagauacagccaga | 11179 | | | |
| 2467 | gccagaagacacuauagaa | 11180 | | | |
| 2468 | ccagaagacacuauagaaa | 11181 | | | |
| 2495 | gugcaaucuucacagacau | 11182 | | | |
| 2515 | ggaugaaaugaguguggaa | 11183 | | | |
| 2516 | gaugaaaugaguguggaaa | 11184 | | | |
| 2530 | ggaaagcuuccuaggcaga | 11185 | | | |
| 2561 | caugaaucaguguuggaua | 11186 | | | |
| 2584 | ggacaauuacaaugaucaa | 11187 | | | |
| 2597 | gaucaaaguuucacuaaau | 11188 | | | |
| 2616 | ggaacauaaaccugcaaga | 11189 | | | |
| 2617 | gaacauaaaccugcaagaa | 11190 | | | |
| 2619 | acauaaaccugcaagaaau | 11191 | | | |
| 2629 | gcaagaaauggcacaaauu | 11192 | | | |
| 2630 | caagaaauggcacaaauua | 11193 | | | |
| 2638 | ggcacaaauuagaagaaaa | 11194 | | | |
| 2639 | gcacaaauuagaagaaaau | 11195 | | | |
| 2649 | gaagaaaauuugaaauguu | 11196 | | | |
| 2675 | gcaagauuugacucugaaa | 11197 | | | |
| 2735 | ggucauauagucaugcaau | 11198 | | | |
| 2736 | gucauauagucaugcaaua | 11199 | | | |
| 2738 | cauauagucaugcaauaua | 11200 | | | |
| 2774 | gcaccuauaccaacaacua | 11201 | | | |
| 2784 | caacaacuagagaugacua | 11202 | | | |
| 2804 | gcuuggcaaucuggaacaa | 11203 | | | |
| 2816 | ggaacaaaugcaucuguau | 11204 | | | |
| 2817 | gaacaaaugcaucuguauu | 11205 | | | |
| 2881 | gaguauugcaucagcauau | 11206 | | | |
| 2892 | cagcauauuacauguuuua | 11207 | | | |
| 2916 | guuaugauggagacacaua | 11208 | | | |
| 2924 | ggagacacauauaaaucca | 11209 | | | |
| 2961 | ccaaugacaugggaacuuu | 11210 | | | |
| 2972 | ggaacuuuguguucgcgua | 11211 | | | |
| 2997 | ccagugagcaauuacacaa | 11212 | | | |
| 2998 | cagugagcaauuacacaaa | 11213 | | | |
| 3004 | gcaauuacacaaagucaaa | 11214 | | | |
| 3010 | acacaaagucaaaguggua | 11215 | | | |
| 3019 | caaagugguaacaaggaua | 11216 | | | |
| 3033 | ggauauaucacaaagccaa | 11217 | | | |
| 3034 | gauauaucacaaagccaaa | 11218 | | | |
| 3047 | gccaaacacaccaaagcuu | 11219 | | | |
| 3086 | gcuguucaauacucacaua | 11220 | | | |
| 3092 | caauacucacauacacaua | 11221 | | | |
| 3118 | cuacaaauugaguucagaa | 11222 | | | |
| 3121 | caaauugaguucagaagua | 11223 | | | |
| 3151 | ggcuauaagaccuagaaca | 11224 | | | |
| 3152 | gcuauaagaccuagaacaa | 11225 | | | |
| 3153 | cuauaagaccuagaacaaa | 11226 | | | |
| 3161 | ccuagaacaaaucuaacaa | 11227 | | | |
| 3199 | guaugugcauguugguaau | 11228 | | | |
| 3205 | gcauguugguaaucuaaua | 11229 | | | |
| 3212 | gguaaucuaauauacagaa | 11230 | | | |
| 3213 | guaaucuaauauacagaaa | 11231 | | | |

### In Vitro Analysis

[0333] The efficacy of the siRNA against rhinovirus infection will be tested in human HeLa cells. HeLa cells will be grown in MEM with Earle's Salts supplemented with 10% fetal bovine serum (FBS) and 1% Pluronic F-68. Cells will be infected with a stock of human rhinovirus 16 at 200 plaque forming units (PFU)/ml. The infected cells will be incubated for 1 h to allow the virus to adsorb to cells. After the incubation cells will be transfected with siRNA molecules. Sicontrol from Dharmacon will be used as control siRNA. After the transfection cells will be harvested and supernatant collected at a suitable time point and virus replication will be assayed by real time PCR (13). Virus non-target gene specific primer (eg. polymerase) will also be also used in real time PCR to measure the reduction of virus replication. The supernatant will be utilized for virus plaque assay on HeLa cell monolayer (14). We also plan to transfect cells first with siRNA and then infect with human rhinovirus 16 to study its effect on inhibiting virus replication following methods described above.

### Example 28

### Generation and Testing of siRNAs Derived from Rotavirus

[0334] Rotavirus nuclear proteins were identified using the methods above or from publicly available sequences. siRNAs were identified in nucleic acids encoding rotavirus nuclear proteins using the methods described above.

[0335] Table 31 lists 19-nucleotide regions that are siRNA rotavirus (VP6) nucleoprotein target sequences. The provided 19 nucleotide region is useful as the sense strand to design a variety of siRNA molecules, optionally having different 3′ overhangs in either or both the sense and antisense strands. Thus, one skilled in the art will appreciate that a variety of sense and antisense siRNA sequences may be obtained from each sequence listed in Table 31.

TABLE 31

Rotavirus VP6

| | | | | | |
|---|---|---|---|---|---|
| 5′ | | | 5′ | | |
| nucleotide | | SEQ ID | nucleotide | Conserved target | SEQ ID |
| position | Target sequence | NO | position | sequence | NO |

| | | | | | |
|---|---|---|---|---|---|
| 20 | cgacauggagguucuguac | 11232 | 54 | cuuaaagaugcuagggaca | 11233 |
| 54 | cuuaaagaugcuagggaca | 11233 | 163 | agacuggaggaauugguaa | 11234 |
| 163 | agacuggaggaauugguaa | 11234 | 567 | cuuaaugcuggaucagaaa | 11242 |
| 168 | ggaggaauugguaauuuac | 11235 | 588 | caaguggcuggauuugacu | 11243 |
| 213 | ggucuauuagguacaacac | 11236 | 975 | gcaacaguuggacuuacau | 11250 |
| 236 | gaacuuggaugcuaauuau | 11237 | 1137 | acuaacuauucaccaucua | 11255 |
| 258 | gagaaugcaagaacuauaa | 11238 | 1182 | acgguagcuuccauuagaa | 11257 |
| 314 | ggaugaaauggcaagagaa | 11239 | 1283 | cuucaaguaaggacaugau | 11260 |
| 315 | gaugaaauggcaagagaau | 11240 | | | |
| 556 | gaaccauguggcuuaaugc | 11241 | | | |
| 567 | cuuaaugcuggaucagaaa | 11242 | | | |
| 588 | caaguggcuggauuugacu | 11243 | | | |
| 604 | acuacucaugcgccauaaa | 11244 | | | |
| 605 | cuacucaugcgccauaaau | 11245 | | | |
| 631 | cgaacauacagcaauuuga | 11246 | | | |
| 846 | gcuagauuugguacuauca | 11247 | | | |
| 856 | cuuaaagaugcuagggaca | 11233 | | | |
| 903 | uugaugcguccaccuaaua | 11248 | | | |
| 904 | ugaugcguccaccuaauau | 11249 | | | |
| 975 | gcaacaguuggacuuacau | 11250 | | | |
| 981 | guuggacuuacauuacgua | 11251 | | | |
| 1064 | cgcggugcgucaagaauau | 11252 | | | |
| 1113 | ggcaugaauuggacugaau | 11253 | | | |
| 1114 | gcaugaauuggacugaauu | 11254 | | | |
| 1137 | acuaacuauucaccaucua | 11255 | | | |
| 1181 | cacgguagcuuccauuaga | 11256 | | | |
| 1182 | acgguagcuuccauuagaa | 11257 | | | |
| 1192 | ccauuagaagcauguugau | 11258 | | | |
| 1242 | caaucuuaguuagcaugua | 11259 | | | |
| 1283 | cuucaaguaaggacaugau | 11260 | | | |

### In Vitro Analysis

[0336] The rhesus monkey kidney cell line MA104 will be used to propagate the virus in tissue culture and to make large virus stock. MA104 cells will be infected with an optimized dose of virus before or after transfection of various concentrations of different siRNAs. Sicontrol from Dharmacon at similar concentrations will be used as control siRNA. At a suitable time point cells will be harvested and lysed by two freeze-thaw cycles, and the lysates will be treated with 10 ug/ml of trypsin for 30 min at 37° C. The infectious titer of the viral preparations will be determined by an immunoperoxidase focus assay as described by Pando et al. (15)

[0337] The efficacy of siRNA on the in vivo replication of rotaviruses will be evaluated in the mouse model of rotaviral infection. To do this, mice will be administered with 2-10 mg/kg dose of modified or unmodified siRNA with or without formulation orally or intravenously. Sicontrol from Dharmacon will be administered at the same dose. An optimized dose of rotavirus will be given to the mouse by oral gavage before or after siRNA dosing. At the suitable time points, 2 days after viral inoculation for instance, the distal colon of each mouse will be examined for the presence of bright yellow liquid contents that are characteristic of rotavirus-induced diarrhea and the entire intestinal tract will be collected for quantitation of rotaviral antigen by enzyme immunoassay or RT-PCR.

### Example 29

### In Vitro siRNA Mediated Inhibition of Human Rhinovirus Replication

[0338] The present example demonstrates that exemplary siRNA molecules of the present invention effectively inhibit replication of the human rhinovirus (HRV) in vitro. Thirty-three siRNAs (see Table 32 below for sequences) were screened for their ability to inhibit viral replication of either a major or minor ATCC (American Type Culture Collection) HRV. The 33 siRNAs selected to target the HRV represent “conversed” region(s) of the HRV genome. These siRNAs were chosen by analyzing the available Genbank HRV nucleotide sequences and deriving the “conserved” regions among those sequences by alignment. The screen was performed by initially transfecting Ohio HeLa-I cells (OH-I cells) with one of the 33 siRNAs followed by infection with one of the two different human rhinovirus serotypes. Reduction in viral yield was measured with a TICD₅₀ (Tissue Culture Infective Dose) assay, which estimates viable virus. A decrease in the TICD₅₀ value indicates a decrease in the size of the viable virus population and thus a reduction in viral replication. In the context of the instant example, a larger decrease in TICD₅₀ indicates a more potent viral replication inhibiting siRNA.

TABLE 32

Nucleotide Sequence of 33 siRNAs Targeted
against Human Rhinovirus.

| | | |
|---|---|---|
| 5′ Nucleotide | | |
| Position of the | | |
| siRNA in the | | |
| Viral Target | | HRV Target |
| Sequence | siRNA Nucleotide Sequence | Sequence |

| | | | |
|---|---|---|---|
| 632 | gcucaaguaucuagacaga | (SEQ ID NO: 11088) | VP4 |
| 840 | guguagaagcuuguggaua | (SEQ ID NO: 11095) | VP2 |
| 1079 | ccagaugcucuuaaagaca | (SEQ ID NO: 11107) | VP2 |
| 1085 | gcucuuaaagacaugggua | (SEQ ID NO: 11108) | VP2 |
| 1086 | cucuuaaagacauggguau | (SEQ ID NO: 11109) | VP2 |
| 1088 | cuuaaagacauggguauuu | (SEQ ID NO: 11110) | VP2 |
| 1099 | ggguauuuuuggugaaaau | (SEQ ID NO: 11111) | VP2 |
| 2639 | gcacaaauuagaagaaaau | (SEQ ID NO: 11195) | VP1 |
| 2675 | gcaagauuugacucugaaa | (SEQ ID NO: 11197) | VP1 |
| 2676 | caagauuugacucugaaau | (SEQ ID NO: 11261) | VP1 |
| 3033 | ggauauaucacaaagccaa | (SEQ ID NO: 11217) | VP1 |
| 3034 | gauauaucacaaagccaaa | (SEQ ID NO: 11218) | VP1 |
| 3047 | gccaaacacaccaaagcuu | (SEQ ID NO: 11219) | VP1 |
| 4231 | gaagagaagugaaccugua | (SEQ ID NO: 11262) | P2-C |
| 4356 | cuaaauauuuugaugguua | (SEQ ID NO: 11263) | P2-C |
| 6344 | ccagaaaccuuuuggucua | (SEQ ID NO: 11264) | Pol |
| 6390 | gcaucauggcuuuugauua | (SEQ ID NO: 11265) | Pol |
| 174 | cucuuuuuucaaaauacaa | (SEQ ID NO: 11266) | Pol |
| 178 | uuuuucaaaauacaaaggu | (SEQ ID NO: 11267) | Pol |
| 181 | uucaaaauacaaagguaac | (SEQ ID NO: 11268) | Pol |
| 627 | gugcaguuggaugugaucc | (SEQ ID NO: 11269) | Pol |
| 950 | gauuuagauaaacuuaaaa | (SEQ ID NO: 11270) | Pol |
| 951 | auuuagauaaacuuaaaau | (SEQ ID NO: 11271) | Pol |
| 1196 | gaguccauuagauggacaa | (SEQ ID NO: 11272) | Pol |
| 1197 | aguccauuagauggacaaa | (SEQ ID NO: 11273) | Pol |
| | gaauguggcuaaccuuaaa | (SEQ ID NO: 11274) | 5′ UTR |
| | gaaugcggcuaaccuuaaa | (SEQ ID NO: 11275) | 5′ UTR |
| | gaauguggcuaauccuaaa | (SEQ ID NO: 11276) | 5′ UTR |
| | cugaauguggcuaaccuua | (SEQ ID NO: 11277) | 5′ UTR |
| | ugaauguggcuaaccuuaa | (SEQ ID NO: 11278) | 5′ UTR |
| | gaccaacuacuuugggugu | (SEQ ID NO: 11279) | 5′ UTR |
| | ggaccaacuacuuugggug | (SEQ ID NO: 11280) | 5′ UTR |
| | gggaccaacuacuuugggu | (SEQ ID NO: 11281) | 5′ UTR |

[0339] For this study, two HRV serotypes were tested: the HRV type 16 that which belongs to the major receptor group, which includes 90% of the 101 numbered HRV serotypes and utilizes the ICAM-1 cell surface receptor for entry into cells, and the HRV type 1A that belongs to the minor receptor group and uses several members of the low-density lipoprotein receptor superfamily for cell entry. The inhibitory effect of each of the 33 siRNAs on viral yield of the two rhinovirus serotypes, HRV-16 and HRV-1A, was assessed. All siRNA constructs were stored at a concentration of 5 pmol/μl at −70° C. prior to use. In the instant example, pleconaril and ruprintrivir served as positive controls and are known to effectively inhibit viral replication. Pleconaril was applied at either a concentration of 1 μg or 10 μg while ruprintrivir was applied at 0.1 μg. Sicontrol from Dharmacon™ will be used as negative control siRNA. A viral infection with no siRNA transfection was also performed as a control (labeled “Virus Control 1”, “Virus Control 2” and so forth).

[0340] Initially, control experiments were performed to optimize the transfection procedure (i.e., cell number and Lipofectamine™ 2000 (Invitrogen) concentration with siRNA)) and the infection procedure (i.e., the impact Lipofectamine™ 2000 would have on rhinovirus replication). To optimize the transfection procedure, the wells on two 24-well plates were seeded with either 75,000 or 100,000 OH-I cells per well. The negative impact (degree of silencing) of various concentrations of Lipofectamine™ 2000 (1 μl/well, 1.4 μl/well, or 1.8 μl/well) on the efficacy of a positive siRNA control to degrade a target transcript was determined. A negative siRNA control was also used. After transfection, RNA was extracted from the cells and a RT-PCR was performed. Real-time PCR was also used to determine the degree of silencing that occurred during transfection of both the 24-well plates seeded with 75,000 and 100,000 OH-I cells per well. As anticipated, the results indicated that more silencing occurred with smaller cell numbers. Thus, transfections described in the instant example were performed with the larger cells numbers (100,000 OH-I cells).

[0341] To optimize the infection procedure, the wells of two 24-well plates were seeded with 50,000; 75,000 or 100,000 OH-I cells per well. The cells on one 24-well plate were infected with 10 TCID₅₀ of HRV-16 while the cells on the second plate were infected with 180 TCID₅₀ HRV-16. All three different seeded cell number populations received 0 μl, 1 μl, 1.4 μl or 1.8 μl Lipofectamine™ 2000. Samples were then harvested at 24, 48 and 72 hours post-infection to measure viral yield. At 24 hours, in all instances (with or without Lipofectamine™ 2000), the lower inoculum (10 TCID₅₀) of virus yielded lower titers compared to the higher one (180 TCID₅₀). Again, in all instances, at 48 hours, both viral inocula gave higher virus yields compared to yields observed at 24 hours post-infection. Without lipofectamine, the results indicated that, within the range of cell numbers tested, cell numbers do not affect virus yield. Viral yields measured at 24, 48 and 72 hours post-infection with the lipofectamine concentrations tested did not interfere with HRV infection or growth. From the results described above, subsequent infections described in the instant example were performed with the lower viral inoculum (10 TCID₅₀) and transfections were performed with 1.4 μl/well Lipofectamine™ 2000.

[0342] The transfections were performed as follows: First, 24-well plates were seeded with 100,000 OH-I cells/ml per well in Eagle's minimum essential media (EMEM) with 5% fetal bovine serum, 5% fetal clone serum, 1% L-glutamine and antibiotics. The cells were incubated overnight at 37° C. in a 5% CO₂ incubator. The cell sheet confluency at the time of siRNA transfection was approximately 50-60%. Second, following the overnight incubation, a working Lipofectamine™ 2000 (LF2K) stock solution for each siRNA was made. These stock solutions were made in a 96-well plate prior to applying the solution to the OH-I cells on the 24-well plates. Each LF2K stock solution had a total volume of 50 μl/well and included 1.4 μl of LF2K and 48.6 μl Optimem; the solution was vortexed gently and placed on ice until use. Third, 200 μl of LF2K-Optimem dilution was added to each well of rows A, C and E of a 96-deep-well plate. A volume of 180 μl of Optimem was added to each well of rows B, D, and F. The siRNAs solutions were vortexed, briefly spun in a micro-centrifuge, and then placed on ice. A 20 μl sample of each siRNA was added to the appropriate wells in rows B, D, and F of the 96-deep-well plate and gently mixed by pipetting up and down three times. Thus, at this point of the transfection protocol, the wells in rows B, D and F have a volume of 200 μl (180 μl Optimem plus 20 μl siRNA solution). The liquid in the wells in row A was then transferred to the corresponding wells in row B, the liquid in the wells in row C was then transferred to the corresponding wells in row D, and the liquid in the wells in row E was transferred to the corresponding wells in row F. The result of transferring the liquid created a siRNA-LF2K mixture in the wells in rows B, D and F. After transferring the liquid from each row, the wells were mixed by pipetting up and down five times (pipette tips were changed routinely to avoid cross-contamination). The 96-deep-well plate was then covered tightly and incubated at room temperature for 30 minutes. Finally, after the 30 minute incubation, the 24-well plates with the OH-I cells were removed from the incubator and the media aspirated from all wells. A 400 μl sample of 10% EMEM, without antibiotics, was added to each well followed by the addition of 100 μl of a siRNA-LF2K mixture. Each siRNA was tested in triplicate and therefore three separate wells on the 24-well plate received a 100 μl siRNA-LF2K mixture containing the same siRNA. The transfection plates (24-well plates) were then incubated at 37° C., 5% CO₂ for five hours.

[0343] Following the five hour transfection incubation, all media was aspirated from all wells, and tips were changed between each different siRNA-LF2K mixture to avoid cross-contamination. The cells were then infected with either of the two HRV serotypes by adding 100 μl of 2× virus (106 dilution used for HRV-16 and 10⁵⁵ dilution used for HRV-1A) and 100 μl of 2% McCoy's without antibiotics or MgCl₂ to each well. The virus was incubated with the OH-I cells for one hour at 34° C. The viral media was then aspirated from the wells and all wells were rinsed two times with Hanks balanced salt solution (HBSS) and re-fed with 1.5 ml 2% McCoy's media with antibiotics and MgCl₂. Wells on the 24-well plate that received only pleconaril or ruprintrivir were re-fed with 750 μl 2× drug and 750 μl 2% McCoy's and incubated for 24 hours at 34° C. The total volume of supernatant was 1.5 ml per well. Cells that were cultured with either pleconaril or ruprintrivir were not transfected with a siRNA.

[0344] A 400 μl supernatant sample was harvested from each well, representing each siRNA and the controls, at 24, 48, and 72 hours post-transfection and pooled for later titration. The samples were stored at −70° C. Serial 10-fold dilutions were made for the 24 and 72 hour harvests and tittered in quadruplicate (4 wells per dilution, 100 μl per well). The tittered samples were incubated with OH-I cells cultured in 96-well plates. Over a seven day time period, OH-I cells were observed for cytopathic effect (CPE). The 24 hour harvests were tested at dilutions of 10⁰ to 10⁵ and the 72 hour harvests were tested at dilutions of 10⁰ to 10⁷. The collected virus used for viral yield reduction assay was frozen and a back titer done to determine the inoculum in TCID₅₀; the target inoculum was between 10 to 32 TCID₅₀ per monolayer.

[0345] The results are summarized in Tables 33, 34, 35. Table 33 summarizes the data of siRNAs 1 through 25 transfected into OH-I cells and later infected with the HRV-16 serotype. Table 34 summarizes the data of siRNAs 1 through 25 transfected into OH-I cells later and infected with the HRV-1A serotype. Table 35 summarizes the data of siRNAs 21 and 24 through 33 transfected into OH-I cells and later infected with either the HRV-16 serotype or the HRV-1A serotype. The data presented in Tables 33 and 34 are categorized generally into four different groups. Each group represents a subset of siRNAs that were subjected to the transfection and infection protocols together, in connection with a control (i.e., virus control 1 with group 1, virus control 2 with group 2 and so on). Each group was subjected to the same transfection and infection protocols and had the same virus control. The groups only differ in that the subsets of tested siRNAs of each group were not tested together. The virus control for each group was used as the baseline for comparison to determine if a siRNA within the group reduced viral replication. Similarly, the data represented in Table 35 is categorized generally into four different groups where each group is separated by a thin double line. The four groups in Table 35 are not associated at all by label with the four groups in Tables 33 and 34. The four groups in Table 35 are represented by the virus control and the HRV serotype used. For example, one group contains the “Virus Control 1” with the HRV-16 serotype.

[0346] A TCID₅₀ of between 10 and 32 TCID₅₀ was achieved. In all instances, the positive controls pleconaril and ruprintrivir were inhibitory with reductions of 2 log₁₀ or more at 24 hours and over 5 log₁₀ at 72 hours compared to virus controls. For the instant example, a siRNA is considered to have significantly reduced viral yield when it reduces viral titer by more than 1.0 log₁₀ compared to the virus control. Higher reductions are more likely to indicate specific inhibition. Of the 33 siRNAs tested against HRV-16, six siRNAs (10, 13, 14, 15, 17 and 18) exhibited significant reductions in viral yield (1.5 to 1.75 log_{10/}ml) at 24 hours, compared to the virus control (Tables 33 and 35). At 72 hours, 12 siRNAs (7 through 17 and 19) reduced viral titer by 1.5 to 2.0 log_{10/}ml and one siRNA (18) reduced viral titer by 2.5 log₁₀.

[0347] Of the 33 constructs tested against HRV-1A, there were two siRNAs (7 and 8) that exhibited a 1.25 log₁₀ reduction in titer compared to the virus control at 24 hours, and two siRNAs (4 and 5) that reduced viral titer by 1.5 and 1.75 log₁₀, respectively at 72 hours (Tables 34 and 35). Further, siRNA number 6 reduced viral titer by 1.25 log₁₀ at 72 hours. Of the remaining siRNAs tested, none demonstrated a substantial inhibition of either HRV-16 or HRV-1A.

TABLE 33
In Vitro Reduction of Human Rhinovirus-16 Titer Mediated by siRNA

| | | Human Rhinovirus-16 | |
|---|---|---|---|
| | | (10 TCID₅₀) | |
| | | 24 hour | 72 hour |
| Test Group | siRNA or Control | harvest/0.1 ml | harvest/0.1 ml |
| Group 1 | Virus Control 1 | 2.25 | 6.75 |
| | siRNA 1 | 1.75 | 6.0 |
| | siRNA 2 | 1.25 | 6.25 |
| | siRNA 3 | 1.50 | 6.25 |
| | siRNA 4 | 1.50 | 6.0 |
| | siRNA 5 | 2.50 | 6.25 |
| | siRNA 6 | 1.75 | ≧6.5 |
| | sicontrol | 2.5 | ≧6.5 |
| Group 2 | Virus Control 2 | 2.25 | 7.25 |
| | Pleconaril 1 μg | Ø | Ø |
| | siRNA 7 | 1.75 | 5.5 |
| | siRNA 8 | 1.25 | 5.75 |
| | siRNA 9 | 1.25 | 5.25 |
| | siRNA 10 | 0.5 | 5.5 |
| | siRNA 11 | 1.5 | 5.25 |
| | siRNA 12 | 1.50 | 5.5 |
| Group 3 | Virus Control 3 | 2.5 | 7.75 |
| | siRNA 13 | 1.0 | 6.0 |
| | siRNA 14 | 0.75 | 5.75 |
| | siRNA 15 | 0.75 | 6.25 |
| | siRNA 16 | 2.0 | 6.25 |
| | siRNA 17 | 0.75 | 5.75 |
| | siRNA 18 | 1.0 | 5.25 |
| | siRNA 19 | 2.25 | 6.25 |
| Group 4 | Virus Control 4 | 1.5 | 7.0 |
| | siRNA 20 | 1.5 | 6.25 |
| | siRNA 21 | 1.5 | ≧6.5 |
| | siRNA 22 | 2.0 | 6.25 |
| | siRNA 23 | 2.0 | ≧6.5 |
| | siRNA 24 | 2.50 | ≧6.5 |
| | siRNA 25 | 2.75 | ≧6.5 |

Virus Control is a viral infection of cells with no siRNA transfection.

TABLE 34
In Vitro Reduction of Human Rhinovirus-1A Titer Mediated by siRNA

| | | Human Rhinovirus-1A | |
|---|---|---|---|
| | | (32 TCID₅₀) | |
| | | 24 hour | 72 hour |
| Test Group | siRNA or Control | harvest/0.1 ml | harvest/0.1 ml |
| Group 1 | Virus Control 1 | 1.0 | 7.25 |
| | siRNA 1 | 1.25 | 6.25 |
| | siRNA 2 | 2.25 | 6.75 |
| | siRNA 3 | 1.25 | 6.75 |
| | siRNA 4 | 1.50 | 5.75 |
| | siRNA 5 | 0.5 | 5.50 |
| | siRNA 6 | 1.25 | 6.0 |
| | sicontrol | 1.50 | 7.25 |
| Group 2 | Virus Control 2 | 1.75 | 6.25 |
| | Pleconaril 10 μg | Ø | 0.75 |
| | siRNA 7 | 0.5 | 6.25 |
| | siRNA 8 | 0.5 | 6.25 |
| | siRNA 9 | 1.5 | 6.0 |
| | siRNA 10 | 2.0 | 6.25 |
| | siRNA 11 | 1.75 | 5.75 |
| | siRNA 12 | 1.75 | 6.75 |
| Group 3 | Virus Control 3 | 1.0 | 6.5 |
| | siRNA 13 | 1.75 | 6.75 |
| | siRNA 14 | 1.50 | 6.75 |
| | siRNA 15 | 1.25 | 6.25 |
| | siRNA 16 | 1.75 | 7.0 |
| | siRNA 17 | 1.75 | 6.50 |
| | siRNA 18 | 1.25 | 6.25 |
| | Ruprintrivir. 0.1 μg | Ø | 1.5 |
| Group 4 | Virus Control 4 | 1.0 | 7.0 |
| | siRNA 19 | 1.50 | 6.75 |
| | siRNA 20 | 1.75 | 7.0 |
| | siRNA 21 | Not tested | Not tested |
| | siRNA 22 | 2.0 | 6.75 |
| | siRNA 23 | 2.25 | 6.75 |
| | siRNA 24 | Not tested | Not tested |
| | siRNA 25 | Not tested | Not tested |

TABLE 35
In Vitro Reduction of Human Rhinovirus-1A or Human Rhinovirus-16 Titer
Mediated by siRNA

| | Human Rhinovirus-16 (32 | | | Human Rhinovirus-1A (32 | |
|---|---|---|---|---|---|
| | TCID₅₀) | | | TCID₅₀) | |
| siRNA or | 24 hour | 72 hour | siRNA or | 24 hour | 72 hour |
| Control | harvest/0.1 ml | harvest/0.1 ml | Control | Harvest/0.1 ml | harvest/0.1 ml |
| Virus | 2.0 | 7.0 | Virus | 2.0 | 6.25 |
| Control 1 | | | Control 1 | | |
| siRNA 21 | 1.25 | 6.75 | siRNA 21 | 2.5 | 6.75 |
| siRNA 24 | 1.75 | 6.5 | siRNA 24 | 2.0 | 6.25 |
| siRNA 25 | 1.75 | 6.75 | siRNA 25 | 2.5 | 6.75 |
| siRNA 26 | 3.0 | 6.75 | siRNA 26 | 2.0 | 6.5 |
| siRNA 27 | 2.5 | 7.25 | siRNA 27 | 1.75 | 6.75 |
| siRNA 28 | 2.0 | 6.75 | siRNA 28 | 2.25 | 6.5 |
| Pleconaril | Ø | Ø | Pleconaril | Ø | 0.75 |
| 1 μg | | | 10 μg | | |
| Virus | 2.5 | 7.5 | Virus | 2.50 | 6.5 |
| Control 2 | | | Control 2 | | |
| siRNA 29 | 2.25 | 7.25 | siRNA 29 | 1.5 | 6.5 |
| siRNA 30 | 2.5 | 6.75 | siRNA 30 | 2.0 | 7.0 |
| siRNA 31 | 2.0 | 7.0 | siRNA 31 | 2.0 | 7.0 |
| siRNA 32 | 2.0 | 6.75 | siRNA 32 | 2.5 | 6.0 |
| siRNA 33 | 2.25 | 6.75 | siRNA 33 | 2.25 | 6.5 |
| sicontrol | 2.75 | 7.0 | siRNA | 2.5 | 6.5 |
| | | | control | | |
| Ruprintrivir | Ø | 1.25 | Ruprintrivir | Ø | 0.5 |
| 0.1 μg | | | 0.1 μg | | |

[0348] In summary, both positive controls, pleconaril at 1 μg and ruprintrivir at 10 μg, as expected, significantly inhibited both serotypes of HRV at both 24 hours and 72 hours. The siRNAs 10, 13-15, 17 and 18 at 24 hours and the siRNAs 7 through 19 at 72 hours reduced HRV-16 viral titers by at least 1.0 log₁₀ compared to the virus control. The siRNAs 7 and 8 at 24 hours and siRNAs 4 through 6 at 72 hours reduced HRV-1A viral titers by at least 1.0 log10 compared to the virus control.

[0349] The data in Table 33, 34 and 35 indicate that select siRNAs can effectively reduce viral replication of the human rhinovirus in vitro.

### Example 30

### In Vitro siRNA Mediated Degradation of Human Metapneumovirus RNA

[0350] The present example demonstrates that exemplary siRNAs of the present invention significantly reduce the RNA copy number of a human metapneumovirus (hMPV) target transcript (RNA) in vitro. A reduction in viral RNA copy number of a particular viral transcript correlates with a reduction in virus replication. Consequently, the reduction in viral replication minimizes and/or prevents the production of new viral particles, thus, reducing, if not inhibiting, re-infection and minimizing the viral induced pathology in a patient.

[0351] The instant example describes an initial screen of 200 siRNAs performed with a dual-luciferase assay system to identify siRNAs that effectively reduce target RNA levels as measured indirectly by a reduction in Renilla luciferase activity. Moreover, the instant example describes a secondary screen of 57 identified siRNAs selected from the initial screen of the 200 siRNAs in order to further characterize those siRNAs that effectively reduce target hMPV RNA levels directly.

[0352] Table 36 below describes the 200 siRNAs subject to the initial dual-luciferase assay screen. The 200 siRNAs selected to target hMPV RNA represent “conversed” region(s) of one of the following hMPV genes: N gene, P gene, M gene, F gene, M2-1 gene, M2-2 gene or the L gene. These siRNAs were chosen by analyzing the available Genbank nucleotide sequences of the hMPV genome (Accession #AY297748.1) and deriving the “conserved” regions among those sequences by alignment. For the initial screen, each siRNA was tested in triplicate at 10 nM concentration.

TABLE 36

Nucleotide Sequence of siRNAs Screened by the Dual-Luciferase
Assay.

| | | | |
|---|---|---|---|
| | 5′ Nucleotide | | |
| | Position of the | | |
| | siRNA in the | | hMPV |
| | Viral Target | | Target |
| siRNA # | Sequence | siRNA Nucleotide Sequence | Gene |

| | | | | |
|---|---|---|---|---|
| 1 | 60 | cuucaagggauucaccuaa | (SEQ ID NO: 10885) | N |
| 2 | 74 | ccuaagugaucugucauau | (SEQ ID NO: 10886) | N |
| 3 | 75 | cuaagugaucugucauaua | (SEQ ID NO: 10887) | N |
| 4 | 86 | gucauauaaacaugcuaua | (SEQ ID NO: 10888) | N |
| 5 | 88 | cauauaaacaugcuauauu | (SEQ ID NO: 10889) | N |
| 6 | 111 | gagucucaauacacaauaa | (SEQ ID NO: 10890) | N |
| 7 | 122 | cacaauaaaaagagaugua | (SEQ ID NO: 10891) | N |
| 8 | 174 | cagcaagagauaacacuuu | (SEQ ID NO: 10894) | N |
| 9 | 198 | ggagagauucuuuacacua | (SEQ ID NO: 10895) | N |
| 10 | 199 | gagagauucuuuacacuaa | (SEQ ID NO: 10896) | N |
| 11 | 214 | cuaaacauacugauuacaa | (SEQ ID NO: 10897) | N |
| 12 | 240 | gcagagauagggauacaau | (SEQ ID NO: 10899) | N |
| 13 | 241 | cagagauagggauacaaua | (SEQ ID NO: 10900) | N |
| 14 | 243 | gagauagggauacaauaua | (SEQ ID NO: 10901) | N |
| 15 | 245 | gauagggauacaauauauu | (SEQ ID NO: 10902) | N |
| 16 | 249 | gggauacaauauauuugca | (SEQ ID NO: 10903) | N |
| 17 | 269 | ggcucuaggaucagaaaga | (SEQ ID NO: 10904) | N |
| 18 | 280 | cagaaagaguacaacagau | (SEQ ID NO: 10905) | N |
| 19 | 282 | gaaagaguacaacagauuu | (SEQ ID NO: 10906) | N |
| 20 | 288 | guacaacagauuuuaagaa | (SEQ ID NO: 10907) | N |
| 21 | 383 | guugcaaauguuagauaua | (SEQ ID NO: 10920) | N |
| 22 | 386 | gcaaauguuagauauacau | (SEQ ID NO: 10921) | N |
| 23 | 396 | gauauacauggaguggaaa | (SEQ ID NO: 10922) | N |
| 24 | 416 | gaguuggguagaagaaaua | (SEQ ID NO: 10924) | N |
| 25 | 421 | ggguagaagaaauagacaa | (SEQ ID NO: 10925) | N |
| 26 | 422 | gguagaagaaauagacaaa | (SEQ ID NO: 10926) | N |
| 27 | 429 | gaaauagacaaagaggcaa | (SEQ ID NO: 10927) | N |
| 28 | 435 | gacaaagaggcaagaaaaa | (SEQ ID NO: 10928) | N |
| 29 | 467 | gcuaaaggaaucaucaggu | (SEQ ID NO: 10933) | N |
| 30 | 468 | cuaaaggaaucaucaggua | (SEQ ID NO: 10934) | N |
| 31 | 481 | cagguaacaucccacaaaa | (SEQ ID NO: 10935) | N |
| 32 | 506 | gccuucagcaccagacaca | (SEQ ID NO: 10938) | N |
| 33 | 513 | gcaccagacacaccaauaa | (SEQ ID NO: 10939) | N |
| 34 | 514 | caccagacacaccaauaau | (SEQ ID NO: 10940) | N |
| 35 | 516 | ccagacacaccaauaauuu | (SEQ ID NO: 10941) | N |
| 36 | 562 | cuaaacuagcaucaacaau | (SEQ ID NO: 10944) | N |
| 37 | 588 | ggacuagagacuacaguua | (SEQ ID NO: 10945) | N |
| 38 | 663 | ccgaagauugcuagaucuu | (SEQ ID NO: 10951) | N |
| 39 | 676 | gaucuuucuaugaacuauu | (SEQ ID NO: 10952) | N |
| 40 | 715 | ggagucuauucauugagua | (SEQ ID NO: 10954) | N |
| 41 | 716 | gagucuauucauugaguau | (SEQ ID NO: 10955) | N |
| 42 | 735 | gggaaagcuuuaggcucau | (SEQ ID NO: 10956) | N |
| 43 | 741 | gcuuuaggcucaucuucaa | (SEQ ID NO: 10957) | N |
| 44 | 747 | ggcucaucuucaacaggaa | (SEQ ID NO: 10958) | N |
| 45 | 763 | gaagcaaagcagaaaguuu | (SEQ ID NO: 10959) | N |
| 46 | 778 | guuuguuuguaaauauauu | (SEQ ID NO: 10960) | N |
| 47 | 816 | ggucaaacaaugcuaaggu | (SEQ ID NO: 10966) | N |
| 48 | 846 | gccagaucaucuaacaaca | (SEQ ID NO: 10968) | N |
| 49 | 847 | ccagaucaucuaacaacau | (SEQ ID NO: 10969) | N |
| 50 | 850 | gaucaucuaacaacauaau | (SEQ ID NO: 10971) | N |
| 51 | 860 | caacauaaugcuaggacau | (SEQ ID NO: 10972) | N |
| 52 | 891 | gcugaauugaagcaaguua | (SEQ ID NO: 10974) | N |
| 53 | 953 | gcuuuuacaucuaagacaa | (SEQ ID NO: 10979) | N |
| 54 | 1038 | gcuucaggucuagguauaa | (SEQ ID NO: 10980) | N |
| 55 | 1104 | gcagaaaguuaugccagaa | (SEQ ID NO: 10983) | N |
| 56 | 1116 | gccagaagcuuaaaagaaa | (SEQ ID NO: 10984) | N |
| 57 | 1123 | gcuuaaaagaaagcaacaa | (SEQ ID NO: 10985) | N |
| 58 | 1163 | gcucacagacgaagaaaaa | (SEQ ID NO: 10986) | N |
| 59 | 1297 | ggguaaugaagcagcaaaa | (SEQ ID NO: 11282) | P |
| 60 | 1319 | gcagaagcuuuccagaaau | (SEQ ID NO: 11283) | P |
| 61 | 1380 | gggaaaaaguaaacacuau | (SEQ ID NO: 11284) | P |
| 62 | 1381 | ggaaaaaguaaacacuaua | (SEQ ID NO: 11285) | P |
| 63 | 1699 | gcucucagacaaugaggaa | (SEQ ID NO: 11286) | P |
| 64 | 1724 | gcagaguccucaaucuuaa | (SEQ ID NO: 11287) | P |
| 65 | 1780 | ggcuagacuagaaucaaua | (SEQ ID NO: 11288) | P |
| 66 | 1898 | gguauaagagaagaacuaa | (SEQ ID NO: 11289) | P |
| 67 | 1963 | ggaagaggaaaugaaucaa | (SEQ ID NO: 11290) | P |
| 68 | 2017 | cgagaaggcaaaagaacuu | (SEQ ID NO: 11291) | P |
| 69 | 2104 | ggauaacaaucaaggagaa | (SEQ ID NO: 11292) | P |
| 70 | 2196 | ggacacuuaucaaggcauu | (SEQ ID NO: 11293) | M |
| 71 | 2431 | cccaaaaaauucgaaguaa | (SEQ ID NO: 11294) | M |
| 72 | 2432 | ccaaaaaauucgaaguaaa | (SEQ ID NO: 11295) | M |
| 73 | 2542 | ccauaugggauggugucaa | (SEQ ID NO: 11296) | M |
| 74 | 2576 | ccaaaucaguuggcaacaa | (SEQ ID NO: 11297) | M |
| 75 | 3071 | ggaaagugaugauuaucau | (SEQ ID NO: 11298) | F |
| 76 | 3115 | ggacuaaaggaaaguuauu | (SEQ ID NO: 11299) | F |
| 77 | 3430 | gcgauagccaaaaccauaa | (SEQ ID NO: 11300) | F |
| 78 | 3449 | ggcuugagagugaagugaa | (SEQ ID NO: 11301) | F |
| 79 | 3589 | gcaauuaacaagaacaaau | (SEQ ID NO: 11302) | F |
| 80 | 3631 | gcugucagcuucagucaau | (SEQ ID NO: 11303) | F |
| 81 | 3697 | gggauaacaccagcaauau | (SEQ ID NO: 11304) | F |
| 82 | 3709 | gcaauaucauuggaccuaa | (SEQ ID NO: 11305) | F |
| 83 | 3818 | ggagaaaaggauuuggaau | (SEQ ID NO: 11306) | F |
| 84 | 3928 | gcucccucuuguucagaaa | (SEQ ID NO: 11307) | F |
| 85 | 4010 | ccacuguuuacuacccaaa | (SEQ ID NO: 11308) | F |
| 86 | 4093 | gcugagcaaucaagagaau | (SEQ ID NO: 11309) | F |
| 87 | 4154 | gcacaggaagacacccuau | (SEQ ID NO: 11310) | F |
| 88 | 4356 | gggugaacagcauguaaua | (SEQ ID NO: 11311) | F |
| 89 | 4522 | ggaaacacuggcuucauua | (SEQ ID NO: 11312) | F |
| 90 | 4589 | gcaucaucaucauaaucaa | (SEQ ID NO: 11313) | F |
| 91 | 4673 | cgcauaguuaguuaauuaa | (SEQ ID NO: 11314) | F |
| 92 | 4674 | gcauaguuaguuaauuaaa | (SEQ ID NO: 11315) | F |
| 93 | 4716 | cguaaagcuccaugcaaau | (SEQ ID NO: 11316) | M2-1 |
| 94 | 4771 | gcaaauucaaccacaauua | (SEQ ID NO: 11317) | M2-1 |
| 95 | 4993 | gcuauagucuacauaacau | (SEQ ID NO: 11318) | M2-1 |
| 96 | 5021 | gcuacaagaaauagaagua | (SEQ ID NO: 11319) | M2-1 |
| 97 | 5082 | gcacuucacaacuugauau | (SEQ ID NO: 11320) | M2-1 |
| 98 | 5104 | ccuauauggagaugagcaa | (SEQ ID NO: 11321) | M2-1 |
| 99 | 5160 | ccaagagaaaaacugaaaa | (SEQ ID NO: 11322) | M2-1 |
| 100 | 5184 | gcgaaauuaauaauugauu | (SEQ ID NO: 11323) | M2-1 |
| 101 | 5185 | cgaaauuaauaauugauuu | (SEQ ID NO: 11324) | M2-1 |
| 102 | 5254 | gcacuaaucaagugcagua | (SEQ ID NO: 11325) | M2-1 |
| 103 | 5318 | ggacacacaaagaauuaaa | (SEQ ID NO: 11326) | M2-2 |
| 104 | 5359 | gcaaaaucacacaccaaua | (SEQ ID NO: 11327) | M2-2 |
| 105 | 5422 | gcuuacuuaaguuaguaaa | (SEQ ID NO: 11328) | M2-2 |
| 106 | 5454 | gggauaaaugacaaugaaa | (SEQ ID NO: 11329) | SH |
| 107 | 5455 | ggauaaaugacaaugaaaa | (SEQ ID NO: 11330) | SH |
| 108 | 5548 | gguaaauugcuuauugcau | (SEQ ID NO: 11331) | SH |
| 109 | 5816 | cgaaucaaugcacaaauau | (SEQ ID NO: 11332) | SH |
| 110 | 7097 | gggacaaauaacaauggau | (SEQ ID NO: 11333) | L |
| 111 | 7194 | gcaauuggcucaugccuuu | (SEQ ID NO: 11334) | L |
| 112 | 7352 | gcagcaugaaauaaugaaa | (SEQ ID NO: 11335) | L |
| 113 | 7388 | gcucacauuauuaaaacaa | (SEQ ID NO: 11336) | L |
| 114 | 7436 | ccuaaaauuaaguaugaua | (SEQ ID NO: 11337) | L |
| 115 | 7546 | gguuuaguaacugguauaa | (SEQ ID NO: 11338) | L |
| 116 | 7558 | gguauaaucucaauaaauu | (SEQ ID NO: 11339) | L |
| 117 | 7669 | gguguguaguaaaaagcaa | (SEQ ID NO: 11340) | L |
| 118 | 7721 | ccaacuguuaacauggaaa | (SEQ ID NO: 11341) | L |
| 119 | 7780 | ggguaaguaacaaccugaa | (SEQ ID NO: 11342) | L |
| 120 | 7812 | ggacuaggauuuagaagua | (SEQ ID NO: 11343) | L |
| 121 | 7839 | gguauguuaacuaauaaau | (SEQ ID NO: 11344) | L |
| 122 | 8279 | ggagagcuuaacagaacua | (SEQ ID NO: 11345) | L |
| 123 | 8304 | gcauuuauacuaagaauua | (SEQ ID NO: 11346) | L |
| 124 | 8435 | gcuaaguguacaagauuuu | (SEQ ID NO: 11347) | L |
| 125 | 8566 | cgguauauccaaaaaauua | (SEQ ID NO: 11348) | L |
| 126 | 8766 | gggaaagaaagagaauuaa | (SEQ ID NO: 11349) | L |
| 127 | 8811 | ccuggcaaacaaagacaaa | (SEQ ID NO: 11350) | L |
| 128 | 8927 | ggaaaugaaaucagaacuu | (SEQ ID NO: 11351) | L |
| 129 | 8962 | ggaagaaugauaguuacaa | (SEQ ID NO: 11352) | L |
| 130 | 8991 | gcaagagccuccauaguaa | (SEQ ID NO: 11353) | L |
| 131 | 9014 | ccuaaguaaauucaaucaa | (SEQ ID NO: 11354) | L |
| 132 | 9133 | ccacaaugauaugugcaua | (SEQ ID NO: 11355) | L |
| 133 | 9214 | ggcuauacagauaccauau | (SEQ ID NO: 11356) | L |
| 134 | 9483 | ggugaaacauauauaucaa | (SEQ ID NO: 11357) | L |
| 135 | 9558 | cccauaaaaaagauauuaa | (SEQ ID NO: 11358) | L |
| 136 | 9577 | ggguaggucccuggauaaa | (SEQ ID NO: 11359) | L |
| 137 | 9666 | ggagaaaguauacuaguua | (SEQ ID NO: 11360) | L |
| 138 | 9933 | gcaaucagccauguggauu | (SEQ ID NO: 11361) | L |
| 139 | 10008 | gccuuauuaucuauagaaa | (SEQ ID NO: 11362) | L |
| 140 | 10009 | ccuuauuaucuauagaaaa | (SEQ ID NO: 11363) | L |
| 141 | 10038 | gcuacauuaacaacacuaa | (SEQ ID NO: 11364) | L |
| 142 | 10092 | gcuaagguaacaagugaua | (SEQ ID NO: 11365) | L |
| 143 | 10173 | gcuauacacuauagcagaa | (SEQ ID NO: 11366) | L |
| 144 | 10311 | gguacaaagucuauaacua | (SEQ ID NO: 11367) | L |
| 145 | 10350 | gcuaucaauggugaagaua | (SEQ ID NO: 11368) | L |
| 146 | 10404 | ggguuguuaucuaggauau | (SEQ ID NO: 11369) | L |
| 147 | 10581 | gcgacuaguucucauuuaa | (SEQ ID NO: 11370) | L |
| 148 | 10582 | cgacuaguucucauuuaaa | (SEQ ID NO: 11371) | L |
| 149 | 10670 | gguaggaucaagcacucaa | (SEQ ID NO: 11372) | L |
| 150 | 10681 | gcacucaagagaaaaaauu | (SEQ ID NO: 11373) | L |
| 151 | 10704 | ccuguuuauaacagacaaa | (SEQ ID NO: 11374) | L |
| 152 | 10795 | ggcuaagaagauugcucaa | (SEQ ID NO: 11375) | L |
| 153 | 10796 | gcuaagaagauugcucaau | (SEQ ID NO: 11376) | L |
| 154 | 10822 | gcauaggaaguuuagguau | (SEQ ID NO: 11377) | L |
| 155 | 10860 | ccucuauuaccaagauuua | (SEQ ID NO: 11378) | L |
| 156 | 10869 | ccaagauuuaugaguguaa | (SEQ ID NO: 11379) | L |
| 157 | 10944 | ccagcuuauaggacaacaa | (SEQ ID NO: 11380) | L |
| 158 | 10947 | gcuuauaggacaacaaauu | (SEQ ID NO: 11381) | L |
| 159 | 10954 | ggacaacaaauuaccacuu | (SEQ ID NO: 11382) | L |
| 160 | 11102 | cccaaaacaauuagucuua | (SEQ ID NO: 11383) | L |
| 161 | 11154 | ccuccuguauuucaaggaa | (SEQ ID NO: 11384) | L |
| 162 | 11253 | gggaagaugcuuaugccua | (SEQ ID NO: 11385) | L |
| 163 | 11364 | gcaugccauugguguggaa | (SEQ ID NO: 11386) | L |
| 164 | 11369 | ccauugguguggaauauua | (SEQ ID NO: 11387) | L |
| 165 | 11666 | ccuaucauuaguagguuau | (SEQ ID NO: 11388) | L |
| 166 | 11679 | gguuauauaggauuuaaaa | (SEQ ID NO: 11389) | L |
| 167 | 11688 | ggauuuaaaaacugguuua | (SEQ ID NO: 11390) | L |
| 168 | 11732 | gcaugaaguacccuggauu | (SEQ ID NO: 11391) | L |
| 169 | 11764 | gggagcuaguugaaauuaa | (SEQ ID NO: 11392) | L |
| 170 | 11765 | ggagcuaguugaaauuaaa | (SEQ ID NO: 11393) | L |
| 171 | 11874 | cgauuaauuaggaagaaau | (SEQ ID NO: 11394) | L |
| 172 | 12022 | ccaguucagacuacaacaa | (SEQ ID NO: 11395) | L |
| 173 | 12042 | gggaaguuaacaagaaauu | (SEQ ID NO: 11396) | L |
| 174 | 12043 | ggaaguuaacaagaaauua | (SEQ ID NO: 11397) | L |
| 175 | 12083 | gcacguaaacagguauaau | (SEQ ID NO: 11398) | L |
| 176 | 12151 | ggaaauugauaaaggacuu | (SEQ ID NO: 11399) | L |
| 177 | 12164 | ggacuuaaacccuaagguu | (SEQ ID NO: 11400) | L |
| 178 | 12173 | cccuaagguucuuuacuuu | (SEQ ID NO: 11401) | L |
| 179 | 12174 | ccuaagguucuuuacuuua | (SEQ ID NO: 11402) | L |
| 180 | 12204 | gcagguaacuggauggcaa | (SEQ ID NO: 11403) | L |
| 181 | 12207 | gguaacuggauggcaagaa | (SEQ ID NO: 11404) | L |
| 182 | 12272 | ggaugaucuugaucaccau | (SEQ ID NO: 11405) | L |
| 183 | 12367 | ccacagaugcaacucaaaa | (SEQ ID NO: 11406) | L |
| 184 | 12394 | gggacuugauacacagaau | (SEQ ID NO: 11407) | L |
| 185 | 12395 | ggacuugauacacagaaua | (SEQ ID NO: 11408) | L |
| 186 | 12534 | ggaacagaucuuuacuuau | (SEQ ID NO: 11409) | L |
| 187 | 12572 | ggacugcaauauaaaguua | (SEQ ID NO: 11410) | L |
| 188 | 12692 | gccaugucacggagaaaua | (SEQ ID NO: 11411) | L |
| 189 | 12754 | ccucaaaaaaacuagacaa | (SEQ ID NO: 11412) | L |
| 190 | 12810 | ggauuaagaauaccaauaa | (SEQ ID NO: 11413) | L |
| 191 | 12902 | cggaaguaagauuauagaa | (SEQ ID NO: 11414) | L |
| 192 | 12903 | ggaaguaagauuauagaau | (SEQ ID NO: 11415) | L |
| 193 | 12961 | gguuagagcauaucuugaa | (SEQ ID NO: 11416) | L |
| 194 | 12990 | ggugaauuaaacuaugauu | (SEQ ID NO: 11417) | L |
| 195 | 13035 | cccaauaugaucaagcuua | (SEQ ID NO: 11418) | L |
| 196 | 13036 | ccaauaugaucaagcuuau | (SEQ ID NO: 11419) | L |
| 197 | 13061 | ccugggaaaugcagagaua | (SEQ ID NO: 11420) | L |
| 198 | 13064 | gggaaaugcagagauaaaa | (SEQ ID NO: 11421) | L |
| 199 | 13065 | ggaaaugcagagauaaaaa | (SEQ ID NO: 11422) | L |
| 200 | 13071 | gcagagauaaaaaaacuaa | (SEQ ID NO: 11423) | L |

[0353] Table 37 below summarizes the results of the dual-luciferase assay. The firefly luciferase represents the internal transfection control and the luciferase assay control (i.e., the firefly luciferase transcript is not a target for the siRNA). The renilla luciferase transcript is fused with a hMPV target sequence. A reduction in renilla luciferase activity indicates a decrease in the number of renilla luciferase/hMPV target sequence transcripts within the cell. Thus, according to the assay, a greater reduction in measured renilla luciferase activity is indicative of a more potent siRNA. siRNA potency is expressed as percent silencing (% silencing) in Table 37 and was computed as 100×[1−(mean Renilla siRNA/mean Firefly siRNA)/(mean Renilla sicontrol/mean Firefly sicontrol)]. A higher percentage correlates with a more potent siRNA.

TABLE 37
Dual-Luciferase Assay Results for 200 siRNA Screened for Target RNA
Degradation Efficacy.

| hMPV | | | | | | | | |
|---|---|---|---|---|---|---|---|---|
| Target | | | | | | | | |
| Gene | siRNA | Firefly Luciferase | | | Renilla Luciferase | | | % Silencing |
| N | N | 27.928 | 30.5828 | 25.3713 | 47.7974 | 53.8565 | 42.2478 | 0% |
| | sicontrol | | | | | | | |
| N | 1 | 30.5676 | 34.8861 | 31.0843 | 5.5751 | 5.8177 | 5.7094 | 90.520306 |
| N | 2 | 34.6326 | 40.9162 | 41.3312 | 60.5914 | 66.5246 | 64.5825 | 12.235444 |
| N | 3 | 18.7181 | 26.9685 | 28.9728 | 39.1731 | 60.4988 | 68.5949 | −20.602022 |
| N | 4 | 27.9183 | 32.8811 | 32.7704 | 49.3759 | 57.7581 | 62.7936 | 2.8217953 |
| N | 5 | 30.0243 | 31.9289 | 37.605 | 52.6084 | 57.8041 | 65.4435 | 5.4806332 |
| N | 6 | 18.712 | 21.1744 | 24.0004 | 11.6898 | 13.4643 | 13.1618 | 67.907131 |
| N | 7 | 39.1671 | 47.9692 | 46.2934 | 51.3052 | 65.0097 | 63.7821 | 27.773825 |
| N | 8 | 30.3026 | 37.0956 | 33.5938 | 48.9493 | 64.1518 | 60.6797 | 7.9220868 |
| N | 9 | 35.0222 | 28.5869 | 32.3542 | 49.0298 | 39.227 | 44.5528 | 25.9432 |
| N | 10 | 26.0519 | 23.1261 | 21.7516 | 36.0005 | 31.4406 | 28.4737 | 27.639966 |
| N | 11 | 23.5992 | 21.4999 | 24.566 | 36.6642 | 37.1155 | 43.3241 | 10.050993 |
| N | 12 | 37.8536 | 31.3862 | 29.8096 | 51.8933 | 47.7502 | 43.2448 | 22.805658 |
| N | 13 | 27.2456 | 24.903 | 28.1906 | 39.0897 | 32.1443 | 39.7394 | 26.085092 |
| N | 14 | 21.7298 | 20.521 | 18.591 | 25.9944 | 24.4481 | 21.3958 | 36.817815 |
| N | 15 | 33.9466 | 28.5711 | 32.9416 | 46.8615 | 42.5866 | 45.7029 | 24.239703 |
| N | 16 | 40.9688 | 32.0063 | 34.3876 | 67.8157 | 55.4525 | 61.4958 | 7.9116736 |
| N | 17 | 20.4853 | 22.1031 | 21.0988 | 21.3855 | 21.3583 | 21.3474 | 46.149853 |
| N | 18 | 20.3425 | 21.123 | 18.9807 | 19.5657 | 22.2023 | 18.1191 | 46.984248 |
| N | 19 | 24.3143 | 22.3699 | 21.9125 | 28.1652 | 25.1039 | 27.0592 | 37.337748 |
| N | 20 | 29.8761 | 28.1125 | 28.8518 | 40.4098 | 38.2723 | 36.6134 | 28.955381 |
| N | 21 | 35.0731 | 36.1802 | 33.7572 | 61.344 | 62.583 | 58.5114 | 7.0339931 |
| N | 22 | 18.0974 | 15.6114 | 18.4168 | 38.8525 | 31.0135 | 36.2891 | −8.9758953 |
| N | 23 | 35.6841 | 34.8649 | 33.183 | 51.5648 | 50.7528 | 44.4457 | 24.291374 |
| N | 24 | 35.767 | 33.8879 | 32.1497 | 61.7046 | 69.0208 | 55.6915 | 2.015241 |
| N | 25 | 25.2963 | 24.0016 | 22.5738 | 32.506 | 27.3097 | 26.8378 | 35.483791 |
| N | 26 | 25.6974 | 26.4022 | 26.2649 | 34.9944 | 37.9287 | 35.6109 | 25.888246 |
| N | 27 | 26.0077 | 26.8305 | 29.8229 | 37.7121 | 38.4859 | 37.4114 | 26.454901 |
| N | 28 | 23.4401 | 23.4625 | 20.671 | 15.6677 | 17.1257 | 14.6688 | 62.415268 |
| N | 29 | 24.4111 | 27.6527 | 21.3214 | 45.0223 | 46.2752 | 38.6559 | 5.241143 |
| N | 30 | 24.1915 | 20.593 | 22.9204 | 47.4054 | 41.0789 | 45.5486 | −5.9331685 |
| N | 31 | 35.4845 | 34.6695 | 32.716 | 41.0051 | 38.409 | 36.9601 | 39.464711 |
| N | 32 | 25.3755 | 26.211 | 24.9847 | 9.9498 | 10.2209 | 9.3382 | 79.378122 |
| N | 33 | 23.0457 | 25.5582 | 27.6969 | 9.683 | 10.262 | 11.014 | 78.288067 |
| N | 34 | 11.2645 | 11.9403 | 14.4547 | 11.8901 | 13.8073 | 13.65 | 44.090947 |
| N | 35 | 26.0071 | 29.8332 | 30.1544 | 38.4229 | 48.6692 | 47.6686 | 16.144371 |
| N | 36 | 16.1825 | 18.755 | 18.5051 | 32.9247 | 36.1832 | 38.2632 | −7.5079233 |
| N | 37 | 26.6079 | 26.5607 | 32.4129 | 46.0072 | 50.0075 | 57.9052 | 3.7600193 |
| N | 38 | 24.1958 | 24.3966 | 25.632 | 46.9843 | 50.0746 | 47.8712 | −4.4846628 |
| N | 39 | 20.0787 | 19.5131 | 19.2493 | 37.2365 | 36.7495 | 36.3744 | −0.3628838 |
| N | 40 | 26.8245 | 28.317 | 29.1997 | 38.0285 | 46.8881 | 45.6146 | 17.183818 |
| N | 41 | 23.9029 | 22.7504 | 18.7435 | 45.447 | 42.9659 | 39.0455 | −4.2923884 |
| N | 42 | 24.802 | 23.0239 | 22.5205 | 33.3397 | 27.5202 | 27.4041 | 32.859839 |
| N | 43 | 27.4113 | 26.1257 | 23.6277 | 53.1069 | 49.1756 | 46.2952 | −3.0328251 |
| N | 44 | 17.6333 | 17.4712 | 16.2981 | 30.8108 | 28.5366 | 26.7737 | 10.346937 |
| N | 45 | 23.3978 | 21.5174 | 21.7461 | 6.7082 | 6.407 | 6.7113 | 84.08477 |
| N | 46 | 28.8204 | 24.9472 | 27.5777 | 45.2449 | 40.7861 | 42.2756 | 15.597137 |
| N | 47 | 16.6454 | 17.2237 | 14.8715 | 17.7277 | 18.8391 | 16.0972 | 42.181926 |
| N | 48 | 19.0061 | 17.7011 | 16.3211 | 12.6826 | 11.95 | 11.394 | 63.645664 |
| N | 49 | 15.3041 | 13.7256 | 15.6344 | 27.2625 | 24.7802 | 26.1378 | 6.3343168 |
| N | 50 | 29.6166 | 30.8804 | 29.1955 | 46.9922 | 48.8737 | 45.96 | 15.38642 |
| N | 51 | 26.862 | 26.8215 | 25.05 | 44.8789 | 42.9423 | 39.9379 | 13.169373 |
| N | 52 | 18.6649 | 17.6678 | 14.733 | 34.3204 | 29.9523 | 27.0617 | 4.2925512 |
| N | 53 | 19.1458 | 17.9679 | 16.554 | 35.2927 | 34.2236 | 30.4593 | 0.3168657 |
| N | 54 | 32.5823 | 33.059 | 32.3469 | 59.0335 | 58.463 | 53.5643 | 6.5848387 |
| N | 55 | 15.3767 | 14.9568 | 12.7516 | 19.6105 | 18.0042 | 17.0053 | 32.163218 |
| N | 56 | 19.1216 | 19.1458 | 18.9002 | 25.5891 | 29.2977 | 24.5872 | 25.609794 |
| N | 57 | 23.8068 | 22.7135 | 20.3704 | 40.9168 | 35.7718 | 34.0778 | 11.389957 |
| N | 58 | 11.4412 | 9.9783 | 11.0364 | 15.4384 | 15.2859 | 14.5539 | 25.348911 |
| P | P | 11.2094 | 10.6081 | 9.4047 | 122.2887 | 131.1846 | 107.7269 | 0% |
| | sicontrol | | | | | | | |
| P | 59 | 10.697 | 13.8648 | 14.7481 | 7.2963 | 9.0423 | 9.3448 | 94.352372 |
| P | 60 | 11.878 | 12.6046 | 13.0613 | 4.9205 | 4.8981 | 5.2248 | 96.536445 |
| P | 61 | 8.1227 | 7.0458 | 7.6793 | 84.1004 | 78.7462 | 77.9821 | 8.8872044 |
| P | 62 | 8.5033 | 9.2861 | 12.1278 | 110.8868 | 111.0465 | 136.1474 | −3.4607181 |
| P | 63 | 10.386 | 11.0685 | 11.9306 | 124.4945 | 132.1592 | 144.0445 | −3.7481185 |
| P | 64 | 15.2151 | 19.144 | 15.4057 | 19.0666 | 25.0996 | 22.5453 | 88.412388 |
| P | 65 | 10.2451 | 10.988 | 9.703 | 129.5517 | 132.5337 | 118.8359 | −6.4351837 |
| P | 66 | 12.8992 | 17.8203 | 16.6212 | 90.4959 | 99.6181 | 121.6685 | 43.071128 |
| P | 67 | 9.6135 | 9.9873 | 11.5392 | 105.3922 | 112.2033 | 120.7532 | 6.0792778 |
| P | 68 | 13.1206 | 12.5217 | 12.1532 | 137.4372 | 118.6314 | 116.0674 | 14.890682 |
| P | 69 | 10.2777 | 8.8893 | 8.9836 | 126.6192 | 112.1464 | 111.3533 | −7.5086526 |
| M | M | 3.4037 | 3.3699 | 3.4842 | 20.6919 | 19.0309 | 20.8162 | 0% |
| | sicontrol | | | | | | | |
| M | 70 | 3.6233 | 4.5514 | 5.0324 | 10.2227 | 11.5743 | 8.4331 | 61.215941 |
| M | 71 | 3.3196 | 2.9542 | 4.016 | 18.8179 | 18.2287 | 21.247 | 4.0079913 |
| M | 72 | 3.5326 | 4.1715 | 4.1092 | 19.1646 | 22.0002 | 20.3861 | 11.715531 |
| M | 73 | 2.2736 | 3.7619 | 2.8816 | 1.305 | 2.0649 | 1.4393 | 90.861596 |
| M | 74 | 2.6656 | 3.0649 | 2.7177 | 23.7602 | 24.0959 | 21.4957 | −39.096015 |
| F | F | 7.8571 | 6.7966 | 7.335 | 55.5336 | 49.8435 | 50.9222 | 0% |
| | sicontrol | | | | | | | |
| F | 75 | 8.8536 | 8.8282 | 6.4977 | 57.069 | 61.3785 | 50.0317 | 1.9739514 |
| F | 76 | 6.3894 | 5.9738 | 6.2884 | 49.3656 | 48.1072 | 52.2303 | −12.916452 |
| F | 77 | 8.4754 | 7.7906 | 7.6508 | 59.9011 | 61.6289 | 59.0789 | −6.2376846 |
| F | 78 | 5.151 | 4.869 | 5.2859 | 14.5073 | 15.2357 | 15.3041 | 58.595219 |
| F | 79 | 4.8134 | 4.503 | 4.6331 | 32.4704 | 38.5899 | 38.216 | −10.207173 |
| F | 80 | 7.7561 | 8.3599 | 6.6592 | 5.0082 | 5.2792 | 4.1739 | 91.067199 |
| F | 81 | 6.8885 | 8.1106 | 6.1432 | 9.4483 | 11.4738 | 8.2177 | 80.610043 |
| F | 82 | 5.6313 | 5.9351 | 4.3754 | 27.3103 | 26.5547 | 24.3652 | 30.963367 |
| F | 83 | 8.5275 | 6.9636 | 7.4137 | 65.0738 | 56.1948 | 52.785 | −6.9052485 |
| F | 84 | 6.8407 | 7.6623 | 7.2884 | 52.2169 | 58.999 | 54.3121 | −6.8633676 |
| F | 85 | 37.6262 | 42.2308 | 35.2346 | 9.3539 | 10.9493 | 9.3019 | 96.015867 |
| F | 86 | 21.7479 | 26.5692 | 26.0961 | 173.6864 | 202.6429 | 197.743 | −19.488891 |
| F | 87 | 33.2708 | 35.3616 | 33.2097 | 22.0311 | 25.3344 | 23.8915 | 89.162949 |
| F | 88 | 40.1018 | 41.192 | 35.8329 | 42.4389 | 47.5863 | 39.7739 | 82.835676 |
| F | 89 | 27.6564 | 29.7642 | 26.5831 | 99.9944 | 105.5671 | 86.835 | 46.088095 |
| F | 90 | 22.8037 | 24.3579 | 19.5137 | 52.1498 | 56.7962 | 49.3069 | 63.238128 |
| F | 91 | 24.6671 | 29.0884 | 24.0965 | 177.5542 | 192.488 | 169.1241 | −7.2664445 |
| F | 92 | 22.5223 | 23.1552 | 21.8042 | 146.8529 | 152.6536 | 161.8563 | −5.8930554 |
| M2-1 | M2-1 | 28.4749 | 31.2531 | 25.9436 | 110.5559 | 114.3964 | 98.9211 | 0% |
| | sicontrol | | | | | | | |
| M2-1 | 93 | 34.9502 | 33.0584 | 36.8185 | 57.1574 | 50.2616 | 59.1375 | 57.970946 |
| M2-1 | 94 | 40.4703 | 42.909 | 34.9406 | 112.9317 | 119.9721 | 101.7199 | 25.189854 |
| M2-1 | 95 | 32.2247 | 23.4849 | 24.6175 | 34.8958 | 28.9595 | 26.8251 | 70.138409 |
| M2-1 | 96 | 20.668 | 23.1818 | 28.7744 | 93.0302 | 101.4748 | 115.0885 | −12.764415 |
| M2-1 | 97 | 20.6971 | 23.0886 | 22.3287 | 91.7718 | 107.8933 | 111.4815 | −24.48889 |
| M2-1 | 98 | 31.7401 | 31.9422 | 26.3181 | 11.23 | 12.3105 | 10.841 | 89.894868 |
| M2-1 | 99 | 36.5257 | 33.5963 | 34.508 | 24.6096 | 22.7964 | 24.4523 | 81.833038 |
| M2-1 | 100 | 27.784 | 30.3075 | 24.6241 | 109.3404 | 114.5398 | 97.2973 | −2.7115507 |
| M2-1 | 101 | 28.8863 | 27.6648 | 28.6818 | 116.8763 | 120.2008 | 123.0177 | −11.756086 |
| M2-1 | 102 | 25.2279 | 34.3368 | 30.4127 | 27.9522 | 36.2849 | 28.8609 | 72.630396 |
| M2-1 | 103 | 22.6833 | 26.793 | 28.4628 | 84.1138 | 93.7308 | 93.3007 | 7.9744776 |
| M2-1 | 104 | 33.2496 | 28.9952 | 28.0762 | 107.0015 | 96.3263 | 88.016 | 14.67454 |
| M2-1 | 105 | 32.3711 | 26.2806 | 31.382 | 33.2508 | 28.4175 | 27.3049 | 73.85939 |
| SH | SH | ND | ND | ND | ND | ND | ND | ND |
| | sicontrol | | | | | | | |
| SH | 106 | 0.0333 | 0.0333 | 0.0339 | 0.0369 | 0.0357 | 0.0357 | ND |
| SH | 107 | 0.0284 | 0.0236 | 0.0248 | 0.0339 | 0.0303 | 0.0296 | ND |
| SH | 108 | 0.0236 | 0.0224 | 0.0236 | 0.0309 | 0.0284 | 0.0254 | ND |
| SH | 109 | 0.0236 | 0.0218 | 0.0206 | 0.0351 | 0.0327 | 0.0333 | ND |
| L | L | 15.3543 | 15.6713 | 13.5671 | 138.9425 | 116.8406 | 124.1569 | 0% |
| | sicontrol | | | | | | | |
| L | 110 | 16.3441 | 18.0024 | 18.1615 | 164.1764 | 165.4451 | 170.5465 | −11.799324 |
| L | 111 | 14.7106 | 14.8183 | 13.9174 | 112.0454 | 104.3504 | 106.5387 | 12.761056 |
| L | 112 | 8.0489 | 7.7386 | 8.5729 | 60.4607 | 62.4535 | 62.3652 | 10.732891 |
| L | 113 | 7.0749 | 6.171 | 5.2127 | 84.5844 | 72.9152 | 62.1946 | −39.69105 |
| L | 114 | 3.9797 | 4.1261 | 5.1661 | 50.3263 | 55.8094 | 59.3057 | −46.305228 |
| L | 115 | 6.8081 | 7.2921 | 6.4898 | 97.8261 | 100.5111 | 79.4885 | −58.367048 |
| L | 116 | 5.6126 | 6.0875 | 5.3155 | 57.1162 | 63.6412 | 54.0211 | −20.556183 |
| L | 117 | 3.7909 | 3.7849 | 3.6046 | 47.9384 | 47.1059 | 41.742 | −43.593245 |
| L | 118 | 9.7205 | 10.2971 | 9.6933 | 9.5554 | 9.0218 | 7.0718 | 89.867809 |
| L | 119 | 12.7631 | 12.5084 | 12.4219 | 109.7966 | 112.026 | 99.7978 | −0.1444821 |
| L | 120 | 16.8837 | 18.9625 | 18.7411 | 102.0466 | 102.9952 | 111.7556 | 31.88563 |
| L | 121 | 22.235 | 20.5791 | 19.7654 | 10.0878 | 10.7484 | 8.4385 | 94.509535 |
| L | 122 | 0.4846 | 0.4882 | 0.4725 | 2.6402 | 2.0437 | 2.0437 | 68.19647 |
| L | 123 | 0.317 | 0.4102 | 0.32 | 3.2694 | 3.2422 | 3.529 | 34.490664 |
| L | 124 | 0.357 | 0.4386 | 0.2916 | 4.0674 | 4.2465 | 4.5296 | 19.286327 |
| L | 125 | 0.4162 | 0.3908 | 0.3848 | 4.9047 | 4.3614 | 4.3372 | 22.014464 |
| L | 126 | 0.3128 | 0.2027 | 0.334 | 0.3896 | 0.2099 | 0.3436 | 92.414791 |
| L | 127 | 0.2323 | 0.2396 | 0.2759 | 4.2072 | 3.4745 | 3.9349 | −6.1369834 |
| L | 128 | 0.4937 | 0.3908 | 0.4834 | 5.5884 | 6.6175 | 7.6369 | 0.8890198 |
| L | 129 | 0.4773 | 0.5372 | 0.4253 | 9.7847 | 9.7556 | 10.2118 | −41.185021 |
| L | 130 | 0.3963 | 0.2547 | 0.2747 | 0.5052 | 0.5772 | 0.5221 | 88.157521 |
| L | 131 | 0.3146 | 0.3086 | 0.3636 | 3.8333 | 4.1787 | 4.6518 | 12.31848 |
| L | 132 | 7.0682 | 5.7445 | 6.603 | 30.6342 | 26.784 | 28.5233 | 20.487506 |
| L | 133 | 4.624 | 5.1213 | 4.2834 | 21.4594 | 26.3478 | 23.4686 | 8.733757 |
| L | 134 | 6.6114 | 5.0058 | 4.9973 | 22.5102 | 17.6533 | 19.1561 | 35.864802 |
| L | 135 | 5.7675 | 5.4849 | 7.2552 | 24.2472 | 25.0531 | 32.0868 | 21.00657 |
| L | 136 | 6.3694 | 7.2261 | 8.4053 | 30.7001 | 32.8376 | 41.2804 | 14.417827 |
| L | 137 | 6.8867 | 5.4559 | 5.1728 | 44.3592 | 35.7017 | 35.5135 | −18.529674 |
| L | 138 | 6.4227 | 5.5279 | 6.0548 | 6.5794 | 4.8219 | 4.5926 | 84.04352 |
| L | 139 | 5.6737 | 6.7881 | 7.6405 | 21.5126 | 17.7658 | 23.2332 | 44.140073 |
| L | 140 | 5.5122 | 6.1432 | 6.1958 | 28.1023 | 23.042 | 22.6173 | 25.775306 |
| L | 141 | 3.6536 | 4.2471 | 3.5574 | 5.7336 | 4.1255 | 4.6186 | 77.302791 |
| L | 142 | 0.6219 | 0.6516 | 0.6032 | 3.6306 | 2.6088 | 2.7733 | 1.8973635 |
| L | 143 | 1.3026 | 0.8857 | 1.0606 | 0.6141 | 0.3521 | 0.5009 | 90.775475 |
| L | 144 | 0.7472 | 0.6486 | 0.7768 | 4.7595 | 3.0801 | 3.2809 | −4.5598996 |
| L | 145 | 0.9783 | 0.7302 | 1.5458 | 1.0315 | 0.6564 | 1.1592 | 82.128305 |
| L | 146 | 0.6552 | 0.6903 | 0.9728 | 1.9433 | 1.6317 | 2.2821 | 48.390028 |
| L | 147 | 0.5003 | 0.8071 | 0.8585 | 0.4568 | 0.7877 | 0.726 | 81.415167 |
| L | 148 | 0.7079 | 0.7314 | 0.8343 | 1.4514 | 1.0878 | 1.0745 | 67.531767 |
| L | 149 | 0.631 | 0.6274 | 0.562 | 1.3092 | 0.9862 | 1.3364 | 59.245486 |
| L | 150 | 0.5257 | 0.5911 | 0.5197 | 0.1016 | 0.1047 | 0.0926 | 96.268955 |
| L | 151 | 0.5161 | 0.8004 | 0.9638 | 0.1343 | 0.1174 | 0.1476 | 96.422926 |
| L | 152 | 0.9335 | 0.9142 | 0.9855 | 3.3438 | 3.7365 | 5.1679 | 11.688827 |
| L | 153 | 1.0715 | 0.821 | 1.6577 | 4.4347 | 3.7934 | 6.263 | 16.618606 |
| L | 154 | 0.7242 | 0.7986 | 0.6026 | 2.4019 | 2.613 | 2.0286 | 32.30315 |
| L | 155 | 0.925 | 0.6582 | 0.4719 | 3.1908 | 1.9088 | 1.8985 | 30.438682 |
| L | 156 | 0.7581 | 0.6474 | 0.6334 | 0.7478 | 0.7127 | 0.6207 | 79.148442 |
| L | 157 | 0.4701 | 0.706 | 0.6002 | 0.0847 | 0.092 | 0.0768 | 97.084707 |
| L | 158 | 0.4447 | 0.7454 | 0.4937 | 0.6619 | 0.8071 | 0.4713 | 76.460404 |
| L | 159 | 0.746 | 0.8355 | 0.8367 | 1.9596 | 1.8943 | 3.8629 | 34.812302 |
| L | 160 | 0.6588 | 0.9595 | 0.8077 | 2.6547 | 5.2484 | 4.0184 | −19.850716 |
| L | 161 | 0.6486 | 0.9257 | 0.945 | 3.0117 | 4.7311 | 3.8781 | −12.502042 |
| L | 162 | 0.7647 | 0.4725 | 0.5378 | 3.0099 | 2.3456 | 2.7219 | −10.987421 |
| L | 163 | 0.6177 | 0.4852 | 0.4187 | 0.4519 | 0.4072 | 0.3104 | 81.254361 |
| L | 164 | 0.631 | 0.8119 | 0.7798 | 0.3618 | 0.4737 | 0.5911 | 84.346124 |
| L | 165 | 0.6467 | 0.4677 | 0.5506 | 3.4352 | 2.4412 | 2.2204 | −18.604099 |
| L | 166 | 0.8367 | 0.7702 | 0.8101 | 4.4691 | 2.9621 | 3.4485 | −9.7844413 |
| L | 167 | 0.6213 | 0.6837 | 0.6238 | 3.9736 | 2.953 | 2.5664 | −20.037463 |
| L | 168 | 0.8591 | 0.5935 | 0.7423 | 1.069 | 0.8089 | 0.7157 | 71.180344 |
| L | 169 | 0.6171 | 0.677 | 0.608 | 1.3479 | 1.4883 | 1.2832 | 47.179666 |
| L | 170 | 0.5512 | 0.6498 | 0.8361 | 2.2052 | 3.7734 | 3.8079 | −17.16977 |
| L | 171 | 0.9293 | 0.8627 | 0.7266 | 3.0801 | 4.9658 | 2.8623 | −5.6317365 |
| L | 172 | 2.0032 | 1.792 | 1.5464 | 12.1696 | 15.1583 | 10.2687 | −8.5798528 |
| L | 173 | 1.8713 | 1.8325 | 1.4593 | 11.9215 | 10.6305 | 10.0569 | 2.5688896 |
| L | 174 | 1.9723 | 2.1544 | 1.7696 | 12.2555 | 15.0336 | 12.9966 | −5.4006726 |
| L | 175 | 2.2845 | 2.2736 | 1.737 | 14.6313 | 13.14 | 11.1925 | 4.5159763 |
| L | 176 | 2.2379 | 1.766 | 2.682 | 14.0784 | 12.1278 | 15.7657 | 3.1564295 |
| L | 177 | 2.6209 | 2.2627 | 2.0733 | 14.86 | 13.82 | 12.2379 | 9.2660922 |
| L | 178 | 1.8767 | 1.6843 | 1.5724 | 12.653 | 10.6928 | 10.3455 | −1.2475919 |
| L | 179 | 1.9844 | 1.795 | 1.6287 | 12.6191 | 13.3905 | 11.0576 | −5.7345954 |
| L | 180 | 2.4478 | 2.3777 | 2.4146 | 11.9863 | 10.6982 | 9.5481 | 31.321182 |
| L | 181 | 1.5101 | 1.4405 | 1.9064 | 10.4411 | 11.2004 | 11.8973 | −6.5249787 |
| L | 182 | 2.247 | 1.9142 | 2.5821 | 9.8597 | 8.3871 | 9.5233 | 36.470271 |
| L | 183 | 1.9765 | 2.6795 | 2.3395 | 8.058 | 10.749 | 9.6431 | 37.261075 |
| L | 184 | 2.5077 | 2.7921 | 2.9336 | 6.2999 | 6.2739 | 6.6713 | 63.941057 |
| L | 185 | 3.0413 | 1.9983 | 2.319 | 11.6989 | 7.6248 | 9.7835 | 38.979288 |
| L | 186 | 2.0044 | 1.5869 | 2.1677 | 13.0329 | 10.4792 | 12.4007 | 3.8001869 |
| L | 187 | 2.1586 | 2.368 | 1.7188 | 13.1581 | 19.5391 | 14.2314 | −15.9176 |
| L | 188 | 2.7037 | 2.6523 | 2.8235 | 11.1042 | 11.538 | 12.1393 | 34.401548 |
| L | 189 | 2.0183 | 1.4992 | 2.1901 | 14.5236 | 12.1266 | 14.3954 | −10.939223 |
| L | 190 | 2.377 | 2.1502 | 2.077 | 13.1279 | 11.5004 | 12.6022 | 13.03376 |
| L | 191 | 2.8393 | 2.5688 | 2.4224 | 17.2576 | 15.5225 | 16.6073 | 2.7031659 |
| L | 192 | 2.4872 | 1.8967 | 2.1217 | 14.4813 | 10.6032 | 11.3625 | 13.573591 |
| L | 193 | 2.1544 | 1.7672 | 1.6704 | 15.027 | 13.6294 | 11.1477 | −9.8076724 |
| L | 194 | 3.4201 | 2.5882 | 2.5253 | 23.5502 | 16.6369 | 15.3428 | −0.3844975 |
| L | 195 | 2.8018 | 2.6305 | 2.247 | 18.415 | 17.2213 | 13.3796 | 1.5337526 |
| L | 196 | 2.5337 | 2.2512 | 3.126 | 13.4286 | 15.7524 | 17.1917 | 9.5708334 |
| L | 197 | 2.898 | 3.8926 | 3.5477 | 6.9103 | 10.8767 | 6.9914 | 63.026023 |
| L | 198 | 2.6227 | 2.2089 | 2.6789 | 8.8384 | 7.4633 | 7.8263 | 50.440774 |
| L | 199 | 2.0824 | 1.7696 | 2.0667 | 9.8337 | 9.8119 | 9.3515 | 24.42115 |
| L | 200 | 2.2567 | 2.6426 | 2.5846 | 9.4743 | 11.6293 | 11.3843 | 33.032251 |

ND is no data

[0354] For the purposes of the instant example and the data presented in Table 37, a siRNA exhibiting 40% or greater silencing of the target Renilla luciferase was considered an effective siRNA. Based on the data in Table 37, the following 57 siRNAs were considered effective siRNAs: 1, 6, 17, 18, 28, 32, 33, 34, 45, 47, 48, 59, 60, 64, 66, 70, 73, 78, 80, 81, 85, 87, 88, 89, 90, 93, 95, 98, 99, 102, 105, 118, 121, 122, 126, 130, 138, 139, 141, 143, 145, 146, 147, 148, 149, 150, 151, 156, 157, 158, 163, 164, 168, 169, 184, 197 and 198. The 57 identified effective siRNAs were further characterized in a secondary screen to determine which of the 57 effectively induced degradation of a targeted hMPV transcript directly.

[0355] Fifty-seven siRNAs (see Table 38 below for sequences) were screened for their ability to induce degradation of a targeted hMPV RNA transcribed from one of the following target viral genes: N gene, P gene, M gene, F gene, M2-1 gene, M2-2 gene or the L gene. In general, the methods used to transfect siRNA and infect cells in culture for the instant example were disclosed above.

[0356] Sicontrol from Dharmacon™ was used as a control siRNA. Viral RNA copy number was determined with quantitative real-time PCR by comparing the replication kinetics of RNA isolated from hMPV infected cells transfected with siRNA to that of a known standard, i.e., the replication kinetics generated from a real-time PCR performed with a template with known copy number (Deffrasnes C, et al., J Clin. Microbiol. 43, 488-90 (2005)). Viral RNA was extracted from 140 μl of infected cell culture supernatants and used as the starting material for the reverse transcriptase and real-time PCR. A lower viral RNA copy number indicates a more potent siRNA. Further, a greater percent inhibition indicates a more potent siRNA.

TABLE 38

Nucleotide Sequence of 57 siRNAs Targeted
against a Human Metapneumovirus Gene Transcript.

| | | | |
|---|---|---|---|
| 5′ Nucleotide | | | |
| Position of the | | | |
| siRNA in the | | | |
| Viral Target | siRNA Nucleotide | | hMPV Target |
| Sequence | Sequence | SEQ ID | Gene |

| | | | |
|---|---|---|---|
| 60 | cuucaagggauucaccuaa | (SEQ ID NO: 10885) | N |
| 111 | gagucucaauacacaauaa | (SEQ ID NO: 10890) | N |
| 269 | ggcucuaggaucagaaaga | (SEQ ID NO: 10904) | N |
| 280 | cagaaagaguacaacagau | (SEQ ID NO: 10905) | N |
| 435 | gacaaagaggcaagaaaaa | (SEQ ID NO: 10928) | N |
| 506 | gccuucagcaccagacaca | (SEQ ID NO: 10938) | N |
| 513 | gcaccagacacaccaauaa | (SEQ ID NO: 10939) | N |
| 514 | caccagacacaccaauaau | (SEQ ID NO: 10940) | N |
| 763 | gaagcaaagcagaaaguuu | (SEQ ID NO: 10959) | N |
| 816 | ggucaaacaaugcuaaggu | (SEQ ID NO: 10966) | N |
| 846 | gccagaucaucuaacaaca | (SEQ ID NO: 10968) | N |
| 1297 | ggguaaugaagcagcaaaa | (SEQ ID NO: 11282) | P |
| 1319 | gcagaagcuuuccagaaau | (SEQ ID NO: 11283) | P |
| 1724 | gcagaguccucaaucuuaa | (SEQ ID NO: 11287) | P |
| 1898 | gguauaagagaagaacuaa | (SEQ ID NO: 11289) | P |
| 2196 | ggacacuuaucaaggcauu | (SEQ ID NO: 11293) | M |
| 2542 | ccauaugggauggugucaa | (SEQ ID NO: 11296) | M |
| 3449 | ggcuugagagugaagugaa | (SEQ ID NO: 11301) | F |
| 3631 | gcugucagcuucagucaau | (SEQ ID NO: 11303) | F |
| 3697 | gggauaacaccagcaauau | (SEQ ID NO: 11304) | F |
| 4010 | ccacuguuuacuacccaaa | (SEQ ID NO: 11308) | F |
| 4154 | gcacaggaagacacccuau | (SEQ ID NO: 11310) | F |
| 4356 | gggugaacagcauguaaua | (SEQ ID NO: 11311) | F |
| 4522 | ggaaacacuggcuucauua | (SEQ ID NO: 11312) | F |
| 4589 | gcaucaucaucauaaucaa | (SEQ ID NO: 11313) | F |
| 4716 | cguaaagcuccaugcaaau | (SEQ ID NO: 11316) | M2-1 |
| 4993 | gcuauagucuacauaacau | (SEQ ID NO: 11318) | M2-1 |
| 5104 | ccuauauggagaugagcaa | (SEQ ID NO: 11321) | M2-1 |
| 5160 | ccaagagaaaaacugaaaa | (SEQ ID NO: 11322) | M2-1 |
| 5254 | gcacuaaucaagugcagua | (SEQ ID NO: 11325) | M2-1 |
| 5422 | gcuuacuuaaguuaguaaa | (SEQ ID NO: 11328) | M2-2 |
| 7721 | ccaacuguuaacauggaaa | (SEQ ID NO: 11341) | L |
| 7839 | gguauguuaacuaauaaau | (SEQ ID NO: 11344) | L |
| 8279 | ggagagcuuaacagaacua | (SEQ ID NO: 11345) | L |
| 8766 | gggaaagaaagagaauuaa | (SEQ ID NO: 11349) | L |
| 8991 | gcaagagccuccauaguaa | (SEQ ID NO: 11353) | L |
| 9933 | gcaaucagccauguggauu | (SEQ ID NO: 11361) | L |
| 10008 | gccuuauuaucuauagaaa | (SEQ ID NO: 11362) | L |
| 10038 | gcuacauuaacaacacuaa | (SEQ ID NO: 11364) | L |
| 10173 | gcuauacacuauagcagaa | (SEQ ID NO: 11366) | L |
| 10350 | gcuaucaauggugaagaua | (SEQ ID NO: 11368) | L |
| 10404 | ggguuguuaucuaggauau | (SEQ ID NO: 11369) | L |
| 10581 | gcgacuaguucucauuuaa | (SEQ ID NO: 11370) | L |
| 10582 | cgacuaguucucauuuaaa | (SEQ ID NO: 11371) | L |
| 10670 | gguaggaucaagcacucaa | (SEQ ID NO: 11372) | L |
| 10681 | gcacucaagagaaaaaauu | (SEQ ID NO: 11373) | L |
| 10704 | ccuguuuauaacagacaaa | (SEQ ID NO: 11374) | L |
| 10869 | ccaagauuuaugaguguaa | (SEQ ID NO: 11379) | L |
| 10944 | ccagcuuauaggacaacaa | (SEQ ID NO: 11380) | L |
| 10947 | gcuuauaggacaacaaauu | (SEQ ID NO: 11381) | L |
| 11364 | gcaugccauugguguggaa | (SEQ ID NO: 11386) | L |
| 11369 | ccauugguguggaauauua | (SEQ ID NO: 11387) | L |
| 11732 | gcaugaaguacccuggauu | (SEQ ID NO: 11391) | L |
| 11764 | gggagcuaguugaaauuaa | (SEQ ID NO: 11392) | L |
| 12394 | gggacuugauacacagaau | (SEQ ID NO: 11407) | L |
| 13061 | ccugggaaaugcagagaua | (SEQ ID NO: 11420) | L |
| 13064 | gggaaaugcagagauaaaa | (SEQ ID NO: 11421) | L |

[0357] The data in Table 98 summarizes the individual effect of 57 different siRNAs on the viral RNA copy number of a siRNA targeted hMPV transcript in cells after transfection with 10 nM siRNA. Each “PCR Results Group” represents the results from a subset of the 57 siRNAs that were analyzed by the real-time PCR together. For the data in Table 39, there are ten “PCR Results Group.” The mean viral RNA copy number was derived from three separate PCRs. The potency of each siRNA to reduce viral RNA copy number was expressed as percent inhibition (“% Inhibition”). To calculate the percent inhibition (“% Inhibition”) for each of the 57 different siRNAs, the mean viral RNA copy number for each siRNA within a “PCR Results Group” was divided by the mean viral RNA copy number for the sicontrol of that same “PCR Results Group.” This number is represented in Table 39 under the column titled “siRNA:sicontrol Ratio.” This number was converted into a percentage by multiplying by 100 and then subtracting that product from 100% to derive the percent inhibition for each siRNA (refer to the column titled “% Inhibition”). A higher percent inhibition indicates that the siRNA has a greater ability to reduce viral RNA copy number of the targeted hMPV transcript and therefore, is likely a more potent inhibitor of viral replication. A negative percent inhibition indicates an increase in viral RNA copy number compared to the control siRNA.

TABLE 39
Effect of 57 Different siRNAs on RNA Copy Number of a hMPV Targeted
RNA in Cells After Transfection with 10 nM siRNA.

| | | | | | Mean | | | |
|---|---|---|---|---|---|---|---|---|
| | | | | | Viral | | | |
| | | Viral RNA Copy Number From | | | RNA | | | |
| | | Three Separate PCRs | | | Copy | | siRNA:sicontrol | % |
| | siRNA # | 1 | 2 | 3 | Number | SD | Ratio | Inhibition |
| PCR | 1 | 8.050E+03 | ND | ND | 8.050E+03 | #DIV/0! | 0.03 | 97% |
| Results | 6 | 1.305E+05 | ND | 2.292E+03 | 6.640E+04 | 9.066E+04 | 0.22 | 78% |
| for Group 1 | 17 | 6.010E+05 | 5.517E+05 | 5.862E+05 | 5.796E+05 | 2.530E+04 | 1.91 | −91% |
| | 18 | 3.894E+05 | 3.281E+05 | 4.095E+05 | 3.757E+05 | 4.240E+04 | 1.24 | −24% |
| | 28 | 3.314E+04 | 2.726E+05 | 4.852E+05 | 2.636E+05 | 2.262E+05 | 0.87 | 13% |
| | 32 | 5.021E+04 | 2.589E+04 | 4.010E+04 | 3.873E+04 | 1.222E+04 | 0.13 | 87% |
| | sicontrol | 2.290E+05 | 2.482E+05 | 4.321E+05 | 3.031E+05 | 1.121E+05 | 1.00 | 0% |
| | No | ND | 1.511E+05 | 7.041E+04 | 1.108E+05 | 5.706E+04 | 0.37 | 63% |
| | siRNA | | | | | | | |
| PCR | 33 | 7.328E+03 | 2.186E+04 | 3.600E+04 | 2.173E+04 | 1.434E+04 | 0.15 | 85% |
| Results | 34 | 1.170E+05 | 1.212E+05 | 7.694E+04 | 1.050E+05 | 2.443E+04 | 0.71 | 29% |
| for Group 2 | 45 | 1.359E+04 | 4.752E+03 | 8.497E+03 | 8.946E+03 | 4.436E+03 | 0.06 | 94% |
| | 47 | 3.141E+04 | 4.034E+04 | 5.323E+04 | 4.166E+04 | 1.097E+04 | 0.28 | 72% |
| | 48 | 5.712E+04 | 9.462E+04 | ND | 7.587E+04 | 2.652E+04 | 0.51 | 49% |
| | 59 | 8.746E+03 | 6.237E+03 | 2.844E+04 | 1.447E+04 | 1.216E+04 | 0.10 | 90% |
| | sicontrol | 1.405E+05 | 1.570E+05 | 1.479E+05 | 1.485E+05 | 8.265E+03 | 1.00 | 0% |
| | No | 1.952E+05 | ND | 1.814E+05 | 1.883E+05 | 9.758E+03 | 1.27 | −27% |
| | siRNA | | | | | | | |
| PCR | 60 | 2.941E+04 | 3.866E+04 | 3.815E+04 | 3.541E+04 | 5.200E+03 | 0.15 | 85% |
| Results | 64 | 7.899E+05 | 4.453E+05 | 7.872E+05 | 6.741E+05 | 1.982E+05 | 2.86 | −186% |
| for Group 3 | 66 | 3.961E+05 | 4.259E+05 | 3.853E+05 | 4.024E+05 | 2.103E+04 | 1.71 | −71% |
| | 70 | 7.425E+04 | 4.081E+04 | 1.290E+05 | 8.135E+04 | 4.452E+04 | 0.35 | 65% |
| | 73 | 1.969E+05 | 2.311E+05 | 2.018E+05 | 2.099E+05 | 1.849E+04 | 0.89 | 11% |
| | 78 | ND | 5.741E+05 | 6.987E+04 | 3.220E+05 | 3.565E+05 | 1.37 | −37% |
| | sicontrol | 3.209E+05 | 1.070E+05 | 2.791E+05 | 2.357E+05 | 1.134E+05 | 1.00 | 0% |
| | No | 1.032E+06 | 1.234E+06 | 1.153E+06 | 1.140E+06 | 1.017E+05 | 4.84 | −384% |
| | siRNA | | | | | | | |
| PCR | 80 | 1.952E+05 | 2.341E+05 | 1.820E+05 | 2.038E+05 | 2.709E+04 | 0.90 | 10% |
| Results | 81 | 5.438E+05 | 2.847E+05 | 4.256E+05 | 4.180E+05 | 1.297E+05 | 1.85 | −85% |
| for Group 4 | 85 | 3.419E+05 | 1.860E+05 | 2.185E+05 | 2.488E+05 | 8.225E+04 | 1.10 | −10% |
| | 87 | 3.616E+05 | 3.363E+05 | ND | 3.490E+05 | 1.789E+04 | 1.54 | −54% |
| | 88 | 7.625E+05 | 4.093E+05 | 2.298E+04 | 3.983E+05 | 3.699E+05 | 1.76 | −76% |
| | 89 | 2.372E+05 | 2.484E+05 | 4.596E+05 | 3.151E+05 | 1.253E+05 | 1.39 | −39% |
| | sicontrol | 4.277E+05 | 1.088E+04 | 2.409E+05 | 2.265E+05 | 2.088E+05 | 1.00 | 0% |
| | No | 2.213E+05 | 1.038E+06 | 8.192E+05 | 6.928E+05 | 4.228E+05 | 3.06 | −206% |
| | siRNA | | | | | | | |
| PCR | 90 | 7.341E+05 | 6.142E+05 | 5.923E+05 | 6.469E+05 | 7.634E+04 | 0.95 | 5% |
| Results | 93 | 4.657E+05 | 2.050E+05 | 6.303E+05 | 4.337E+05 | 2.145E+05 | 0.64 | 36% |
| for Group 5 | 95 | 8.222E+05 | 8.630E+05 | 8.650E+05 | 8.501E+05 | 2.415E+04 | 1.25 | −25% |
| | 98 | 3.501E+05 | 2.234E+05 | 3.626E+05 | 3.120E+05 | 7.701E+04 | 0.46 | 54% |
| | 99 | 1.293E+06 | 6.597E+05 | 7.184E+05 | 8.904E+05 | 3.499E+05 | 1.31 | −31% |
| | 102 | 1.448E+06 | 9.564E+05 | 2.281E+06 | 1.562E+06 | 6.696E+05 | 2.30 | −130% |
| | sicontrol | 8.332E+05 | 6.529E+05 | 5.521E+05 | 6.794E+05 | 1.424E+05 | 1.00 | 0% |
| | No | 8.604E+05 | 4.320E+05 | 7.782E+05 | 6.902E+05 | 2.274E+05 | 1.02 | −2% |
| | siRNA | | | | | | | |
| PCR | 105 | 1.861E+05 | 5.984E+05 | 5.187E+05 | 4.344E+05 | 2.187E+05 | 0.78 | 22% |
| Results | 118 | 6.316E+04 | 8.239E+04 | 6.691E+04 | 7.082E+04 | 1.019E+04 | 0.13 | 87% |
| for Group 6 | 121 | 4.263E+05 | 1.561E+06 | 7.021E+05 | 8.965E+05 | 5.918E+05 | 1.61 | −61% |
| | 122 | 4.748E+05 | 4.637E+05 | 7.151E+05 | 5.512E+05 | 1.421E+05 | 0.99 | 1% |
| | 126 | 9.507E+04 | 6.768E+04 | 7.251E+04 | 7.842E+04 | 1.462E+04 | 0.14 | 86% |
| | 130 | 7.206E+05 | 5.569E+05 | 1.267E+06 | 8.482E+05 | 3.718E+05 | 1.53 | −53% |
| | sicontrol | 4.939E+05 | 6.908E+05 | 4.835E+05 | 5.561E+05 | 1.168E+05 | 1.00 | 0% |
| | No | 9.990E+05 | 7.928E+05 | 6.867E+05 | 8.262E+05 | 1.588E+05 | 1.49 | −49% |
| | siRNA | | | | | | | |
| PCR | 138 | 1.339E+05 | 1.687E+05 | 1.252E+05 | 1.426E+05 | 2.302E+04 | 0.89 | 11% |
| Results | 139 | 8.793E+04 | 6.992E+04 | 1.275E+05 | 9.512E+04 | 2.946E+04 | 0.60 | 40% |
| for Group 7 | 141 | 1.140E+05 | 1.016E+05 | 1.277E+05 | 1.144E+05 | 1.306E+04 | 0.72 | 28% |
| | 143 | 6.155E+04 | 6.303E+04 | 6.659E+04 | 6.372E+04 | 2.591E+03 | 0.40 | 60% |
| | 145 | 4.429E+04 | 2.153E+05 | 8.886E+04 | 1.162E+05 | 8.871E+04 | 0.73 | 27% |
| | 146 | 1.625E+05 | 1.623E+05 | 1.954E+05 | 1.734E+05 | 1.905E+04 | 1.09 | −9% |
| | sicontrol | 2.484E+05 | 1.280E+05 | 1.021E+05 | 1.595E+05 | 7.807E+04 | 1.00 | 0% |
| | No | 1.071E+05 | 7.273E+04 | 1.292E+05 | 1.030E+05 | 2.846E+04 | 0.65 | 35% |
| | siRNA | | | | | | | |
| PCR | 147 | 1.779E+05 | 1.606E+05 | 1.442E+05 | 1.609E+05 | 1.685E+04 | 0.62 | 38% |
| Results | 148 | 1.630E+05 | 1.917E+05 | 1.733E+05 | 1.760E+05 | 1.454E+04 | 0.68 | 32% |
| for Group 8 | 149 | 7.237E+04 | 7.417E+04 | 7.042E+04 | 7.232E+04 | 1.875E+03 | 0.28 | 72% |
| | 150 | 3.667E+04 | 6.480E+02 | 7.660E+04 | 3.797E+04 | 3.799E+04 | 0.15 | 85% |
| | 151 | 4.377E+04 | 6.663E+04 | 5.460E+04 | 5.500E+04 | 1.144E+04 | 0.21 | 79% |
| | 156 | 1.989E+05 | 2.319E+05 | 3.107E+05 | 2.472E+05 | 5.744E+04 | 0.96 | 4% |
| | sicontrol | 1.922E+05 | 1.854E+05 | 3.950E+05 | 2.575E+05 | 1.191E+05 | 1.00 | 0% |
| | No | 1.516E+05 | 2.667E+05 | 2.491E+05 | 2.225E+05 | 6.200E+04 | 0.86 | 14% |
| | siRNA | | | | | | | |
| PCR | 157 | 1.251E+05 | 8.337E+04 | 1.102E+05 | 1.062E+05 | 2.115E+04 | 0.51 | 49% |
| Results | 158 | 1.321E+05 | 1.709E+05 | 1.452E+05 | 1.494E+05 | 1.974E+04 | 0.72 | 28% |
| for Group 9 | 163 | 3.724E+04 | 2.477E+04 | 3.181E+04 | 3.127E+04 | 6.252E+03 | 0.15 | 85% |
| | 164 | 1.478E+04 | 1.923E+04 | 1.439E+04 | 1.613E+04 | 2.689E+03 | 0.08 | 92% |
| | 168 | 6.360E+04 | 7.421E+04 | 4.968E+04 | 6.250E+04 | 1.230E+04 | 0.30 | 70% |
| | 169 | 2.585E+05 | 2.151E+05 | 2.128E+05 | 2.288E+05 | 2.575E+04 | 1.10 | −10% |
| | sicontrol | 1.432E+05 | 3.689E+05 | 1.100E+05 | 2.074E+05 | 1.409E+05 | 1.00 | 0% |
| | No | 1.438E+05 | 1.446E+05 | 3.690E+05 | 2.191E+05 | 1.298E+05 | 1.06 | −6% |
| | siRNA | | | | | | | |
| PCR | 184 | 1.978E+05 | 6.666E+04 | 6.764E+04 | 1.107E+05 | 7.543E+04 | 0.64 | 36% |
| Results | 197 | 3.464E+04 | 8.338E+04 | 8.075E+04 | 6.626E+04 | 2.741E+04 | 0.38 | 62% |
| for Group | 198 | 9.685E+04 | 1.193E+05 | 1.606E+05 | 1.256E+05 | 3.234E+04 | 0.73 | 27% |
| 10 | sicontrol | 1.467E+05 | 1.857E+05 | 1.841E+05 | 1.722E+05 | 2.207E+04 | 1.00 | 0% |
| | No | 7.338E+04 | 6.970E+04 | 6.507E+04 | 6.938E+04 | 4.164E+03 | 0.40 | 60% |
| | siRNA | | | | | | | |

ND is no data;
SD is standard deviation

[0358] The data in Table 39 shows that 19 siRNAs showed 50% or more suppression of viral gene transcripts at 10 nM concentration, including 6 siRNAs targeting the N transcript, 2 siRNAs targeting the P transcript, 1 siRNA targeting the M transcript, 1 siRNA targeting the M2 transcript and 9 siRNAs targeting the L transcript. The No siRNA control among the ten PCR Results Groups exhibited a percent inhibition ranging from −384% to 63%. The viral RNA copy number value for the sicontrol served as the baseline for each PCR Results Group and was normalized to 0% inhibition. The 57 siRNAs transfected at 10 nM concentration showed a percent inhibition ranging from −186% to 97% indicating that identifying siRNAs capable of reducing the RNA copy number of a target transcript requires more than a selection based on the nucleotide sequence of the “conserved” region of a viral target transcript. siRNAs demonstrating a percent inhibition of 50% or higher were considered to be effective at reducing viral RNA copy number at 10 nM concentration (the two No siRNA controls that showed 60% and 63% were outliers and not considered). siRNAs exhibiting 50% or greater inhibition include siRNAs 1, 6, 32, 33, 45, 48, 59, 60, 70, 98, 118, 126, 143, 149, 150, 151, 163, 164, 168 and 197.

[0359] The data in Table 40 shows the individual effect of 57 different siRNAs on the viral RNA copy number of the siRNA targeted hMPV transcript in cells after transfection with 100 nM siRNA (10-fold greater siRNA compared to prior data set, Table 39). Each PCR Results Group represents the results from a subset of the 57 siRNAs that were analyzed by the real-time PCR together. For the data in Table 40, there are six PCR Results Group. The efficacy of each siRNA to reduce viral RNA copy number was expressed as percent inhibition (“% Inhibition”). The mean viral RNA copy number was derived from two separate PCRs. To calculate the percent inhibition (% Inhibition) for each of the 57 different siRNAs, the mean viral RNA copy number for each siRNA within a PCR Results Group was divided by the mean viral RNA copy number for the No siRNA of that same PCR Results Group. This number is represented in Table 40 under the column titled “siRNA:No siRNA Ratio.” This number was converted into a percentage by multiplying by 100 and then subtracting that product from 100% to derive the percent inhibition for each siRNA (refer to the column titled “% Inhibition”). A higher percent inhibition indicates that the siRNA has a greater ability to reduce viral RNA copy number of the targeted hMPV transcript and therefore, is likely a more potent inhibitor of viral replication. A negative percent inhibition indicates an increase in viral RNA copy number compared to the sicontrol.

TABLE 40
Effect of 57 Different siRNAs on RNA Copy Number of a hMPV Targeted
Transcript in Cells After Transfection with 100 nM siRNA

| | | Viral RNA Copy Number | | | | | |
|---|---|---|---|---|---|---|---|
| | | From Two Separate | | Mean Viral | | siRNA:No | |
| | | PCRs | | RNA Copy | | siRNA | % |
| | siRNA # | 1 | 2 | Number | SD | Ratio | Inhibition |
| PCR | 1 | 3.701E+04 | 1.134E+04 | 2.418E+04 | 1.82E+04 | 0.06 | 94% |
| Results for | 6 | 2.907E+05 | 1.600E+05 | 2.254E+05 | 9.24E+04 | 0.52 | 48% |
| Group 1 | 17 | 7.855E+05 | 5.195E+05 | 6.525E+05 | 1.88E+05 | 1.52 | −52% |
| | 18 | 3.411E+05 | 6.491E+05 | 4.951E+05 | 2.18E+05 | 1.15 | −15% |
| | 28 | 6.327E+05 | 8.135E+05 | 7.231E+05 | 1.28E+05 | 1.68 | −68% |
| | 32 | 2.343E+04 | 2.969E+04 | 2.656E+04 | 4.43E+03 | 0.06 | 94% |
| | 33 | 1.647E+04 | 1.694E+04 | 1.671E+04 | 3.32E+02 | 0.04 | 96% |
| | 34 | 3.274E+05 | 5.908E+05 | 4.591E+05 | 1.86E+05 | 1.07 | −7% |
| | 45 | 8.419E+03 | 1.862E+04 | 1.352E+04 | 7.21E+03 | 0.03 | 97% |
| | 47 | 6.430E+04 | 1.277E+05 | 9.600E+04 | 4.48E+04 | 0.22 | 78% |
| | sicontrol | 7.660E+05 | ND | 7.660E+05 | ND | 1.78 | −78% |
| | No SiRNA | 4.303E+05 | ND | 4.303E+05 | ND | 1.00 | 0% |
| PCR | 48 | 6.894E+04 | 9.162E+04 | 8.028E+04 | 1.60E+04 | 0.92 | 8% |
| Results for | 59 | 9.888E+03 | 1.083E+04 | 1.036E+04 | 6.66E+02 | 0.12 | 88% |
| Group 2 | 60 | 1.973E+04 | 7.538E+03 | 1.363E+04 | 8.62E+03 | 0.16 | 84% |
| | 64 | 2.592E+05 | 2.777E+05 | 2.685E+05 | 1.31E+04 | 3.08 | −208% |
| | 66 | 1.529E+05 | 7.619E+04 | 1.145E+05 | 5.42E+04 | 1.31 | −31% |
| | 70 | 5.369E+04 | 5.627E+04 | 5.498E+04 | 1.82E+03 | 0.63 | 37% |
| | 73 | 3.463E+04 | 8.408E+04 | 5.936E+04 | 3.50E+04 | 0.68 | 32% |
| | 78 | 1.058E+05 | 2.303E+05 | 1.681E+05 | 8.80E+04 | 1.93 | −93% |
| | 80 | 5.007E+04 | 4.058E+04 | 4.533E+04 | 6.71E+03 | 0.52 | 48% |
| | 81 | 6.689E+04 | 1.969E+05 | 1.319E+05 | 9.19E+04 | 1.51 | −51% |
| | sicontrol | 1.629E+05 | ND | 1.629E+05 | ND | 1.87 | −87% |
| | No SiRNA | 8.716E+04 | ND | 8.716E+04 | ND | 1.00 | 0% |
| PCR | 85 | 2.370E+05 | 9.781E+05 | 6.076E+05 | 5.24E+05 | 2.07 | −107% |
| Results for | 87 | 1.439E+05 | 1.298E+05 | 1.369E+05 | 9.97E+03 | 0.47 | 53% |
| Group 3 | 88 | 1.430E+05 | 2.324E+05 | 1.877E+05 | 6.32E+04 | 0.64 | 36% |
| | 89 | 1.207E+05 | 1.024E+05 | 1.116E+05 | 1.29E+04 | 0.38 | 62% |
| | 90 | 1.285E+05 | 2.080E+05 | 1.683E+05 | 5.62E+04 | 0.57 | 43% |
| | 93 | 1.622E+05 | 1.628E+05 | 1.625E+05 | 4.24E+02 | 0.55 | 45% |
| | 95 | 2.562E+05 | 2.235E+05 | 2.399E+05 | 2.31E+04 | 0.82 | 18% |
| | 98 | 1.462E+05 | 8.387E+04 | 1.150E+05 | 4.41E+04 | 0.39 | 61% |
| | 99 | 4.047E+05 | 3.334E+05 | 3.691E+05 | 5.04E+04 | 1.26 | −26% |
| | sicontrol | 1.983E+05 | ND | 1.983E+05 | ND | 0.68 | 32% |
| | No SiRNA | 2.331E+05 | 3.525E+05 | 2.928E+05 | 8.44E+04 | 1.00 | 0% |
| PCR | 102 | 3.121E+05 | 1.710E+05 | 2.416E+05 | 9.98E+04 | 0.47 | 53% |
| Results for | 105 | 2.041E+05 | 2.426E+05 | 2.234E+05 | 2.72E+04 | 0.44 | 56% |
| Group 4 | 118 | 8.322E+04 | 6.781E+04 | 7.552E+04 | 1.09E+04 | 0.15 | 85% |
| | 121 | 2.189E+05 | 3.275E+05 | 2.732E+05 | 7.68E+04 | 0.53 | 47% |
| | 122 | 2.351E+05 | 2.788E+05 | 2.570E+05 | 3.09E+04 | 0.50 | 50% |
| | 126 | 4.851E+04 | 6.012E+04 | 5.432E+04 | 8.21E+03 | 0.11 | 89% |
| | 130 | 1.990E+05 | 2.836E+05 | 2.413E+05 | 5.98E+04 | 0.47 | 53% |
| | 138 | 4.972E+05 | 5.052E+05 | 5.012E+05 | 5.66E+03 | 0.98 | 2% |
| | 139 | 4.323E+05 | 5.880E+05 | 5.102E+05 | 1.10E+05 | 0.99 | 1% |
| | sicontrol | 5.693E+05 | ND | 5.693E+05 | ND | 1.11 | −11% |
| | No SiRNA | 3.044E+05 | 7.224E+05 | 5.134E+05 | 2.96E+05 | 1.00 | 0% |
| PCR | 141 | 3.845E+05 | 3.835E+05 | 3.840E+05 | 7.07E+02 | 1.14 | −14% |
| Results for | 143 | 1.913E+05 | 2.214E+05 | 2.064E+05 | 2.13E+04 | 0.61 | 39% |
| Group 5 | 145 | 2.902E+05 | 1.968E+05 | 1.968E+05 | 6.60E+04 | 0.58 | 42% |
| | 146 | 2.519E+05 | 5.554E+05 | 4.037E+05 | 2.15E+05 | 1.20 | −20% |
| | 147 | 3.821E+05 | 3.954E+05 | 3.888E+05 | 9.40E+03 | 1.15 | −15% |
| | 148 | 4.782E+05 | ND | 4.782E+05 | ND | 1.42 | −42% |
| | 149 | 1.933E+05 | 1.449E+05 | 1.691E+05 | 3.42E+04 | 0.50 | 50% |
| | 150 | 1.969E+05 | 1.215E+05 | 1.592E+05 | 5.33E+04 | 0.47 | 53% |
| | 151 | 1.267E+05 | 7.209E+04 | 9.940E+04 | 3.86E+04 | 0.29 | 71% |
| | 156 | 4.391E+05 | ND | 4.391E+05 | ND | 1.30 | −30% |
| | sicontrol | 2.963E+05 | ND | 2.963E+05 | ND | 0.88 | 12% |
| | No SiRNA | 2.970E+05 | 3.773E+05 | 3.372E+05 | 5.68E+04 | 1.00 | 0% |
| PCR | 157 | 3.186E+05 | 1.685E+05 | 2.436E+05 | 1.06E+05 | 0.32 | 68% |
| Results for | 158 | 3.304E+05 | 3.789E+05 | 3.547E+05 | 3.43E+04 | 0.46 | 54% |
| Group 6 | 163 | 9.886E+04 | 1.176E+05 | 1.176E+05 | 1.33E+04 | 0.15 | 85% |
| | 164 | 9.691E+04 | 1.317E+05 | 1.143E+05 | 2.46E+04 | 0.15 | 85% |
| | 168 | 3.521E+05 | 2.240E+05 | 2.881E+05 | 9.06E+04 | 0.38 | 62% |
| | 169 | 4.458E+05 | 9.643E+05 | 7.051E+05 | 3.67E+05 | 0.92 | 8% |
| | 184 | 3.440E+05 | 1.789E+05 | 2.615E+05 | 1.17E+05 | 0.34 | 66% |
| | 197 | 1.713E+05 | 1.475E+05 | 1.594E+05 | 1.68E+04 | 0.21 | 79% |
| | 198 | 2.827E+05 | 4.828E+05 | 3.828E+05 | 1.41E+05 | 0.50 | 50% |
| | 156 | 6.155E+05 | ND | 6.155E+05 | ND | 0.81 | 19% |
| | No SiRNA | 5.505E+05 | 9.779E+05 | 7.642E+05 | 3.02E+05 | 1.00 | 0% |

ND is no data;
SD is standard deviation

[0360] The data in Table 40 shows that 27 siRNAs showed 50% or more suppression of hMPV viral gene expression in vitro, including 5 siRNAs targeting the N transcript, 2 siRNAs targeting the P transcript, 2 siRNAs targeting the F transcript, 3 siRNAs targeting the M2 transcript and siRNAs targeting the 15 L transcript. In general, the quantitative PCR results from the cell transfection/virus infection shown in Table 43 were consistent with the luciferase reporter assay results. The sicontrol among the five PCR Results Groups exhibited a percent inhibition ranging from −87% to 32%. This is in contrast to the sicontrol in Table 42, which served as the baseline value for calculating the percent inhibition. In this data set, the No siRNA served as the baseline for each PCR Results Group and was normalized to 0% inhibition. The 57 siRNAs transfected at 100 nM concentration showed a percent inhibition ranging from −208% to 97%, again, indicating that identifying siRNAs capable of reducing the RNA copy number of a target viral transcript requires more than a selection based on the nucleotide sequence of the “conserved” region of a viral target gene. Based on the percent inhibition observed with the sicontrol (i.e., 32% inhibition), only siRNAs demonstrating a percent inhibition of 50% or higher were considered to be effective at reducing viral RNA copy number at a 100 nM concentration. siRNAs exhibiting 50% or greater inhibition include siRNAs 1, 32, 33, 45, 47, 59, 60, 87, 89, 98, 102, 105, 118, 122, 126, 130, 149, 150, 151, 157, 158, 163, 164, 168, 184, 197 and 198.

[0361] The data in Tables 39 and 40 demonstrate that select siRNAs at either 10 nM or 100 nM concentrations, or both concentrations exhibit the ability to effectively reduce viral RNA copy number of a target hMPV transcript.

### Example 31

### Multi-Viral Targeting

[0362] The present example demonstrates that siRNA capable of mediating significant degradation of hMPV target RNA can also degrade RSV viral RNA. The general cell culture and transfection protocols described earlier were used. Viral RNA copy number was determined with quantitative real-time PCR by comparing the replication kinetics of RNA isolated from RSV infected cells transfected with siRNA to that of a known standard, i.e., the replication kinetics generated from a real-time PCR performed with a template with known copy number (Deffrasnes C, et al., J Clin. Microbiol. 43, 488-90 (2005)). A lower viral RNA copy number indicates a more potent siRNA. Further, a greater percent inhibition indicates a more potent siRNA.

[0363] The siRNAs 118, 126, 150, 151 and 158 that exhibited the ability to effectively reduce viral copy number of the L transcript from hMPV were assessed for their ability to do the same against a RSV target RNA. Each siRNA was transfected at 10 nM concentration. The data is shown below in Table 41.

TABLE 41
Effect of Six Different siRNAs on RNA Copy Number of a RSV Targeted
Transcript in Cells After Transfection with 10 nM siRNA

| | Viral RNA Copy Number from Three | | | | | | |
|---|---|---|---|---|---|---|---|
| | Separate PCRs | | | Mean Viral | | Ratio | |
| siRNA # | 1 | 2 | 3 | Copy Number | SD | siRNA/sicontrol | % Inhibition |
| 118 | 1.852E+06 | 2.510E+06 | 2.055E+06 | 2.139E+06 | 3.368E+05 | 1.75 | −75% |
| 126 | 1.979E+06 | 1.222E+06 | 1.305E+06 | 1.502E+06 | 4.153E+05 | 1.23 | −23% |
| 150 | 1.839E+06 | 2.164E+06 | 1.752E+06 | 1.918E+06 | 2.171E+05 | 1.57 | −57% |
| 151 | 1.073E+06 | 2.469E+06 | 9.120E+05 | 1.484E+06 | 8.561E+05 | 1.22 | −22% |
| 158 | 1.367E+06 | 6.831E+05 | 9.153E+05 | 9.883E+05 | 3.475E+05 | 0.81 | 19% |
| sicontrol | 1.258E+06 | 1.104E+06 | 1.299E+06 | 1.221E+06 | 1.029E+05 | 1.00 | 0% |
| No | 1.149E+06 | 1.741E+06 | 1.259E+06 | 1.383E+06 | 3.147E+05 | 1.13 | −13% |
| siRNA | | | | | | | |

[0364] The data in Table 41 shows that siRNA 158 exhibits the ability to degrade a RSV transcript as measured by an approximate 20% inhibition of RSV viral copy number. These data indicate that a multi-viral targeting siRNA capable of degrading viral transcripts from a wide variety of virus families can be made.

[0365] While the present invention has been described with reference to the specific embodiments thereof, it should be understood by those skilled in the art that various changes may be made and equivalents may be substituted without departing from the true spirit and scope of the invention. In addition, many modifications may be made to adapt a particular situation, material, composition of matter, process, process step or steps, to the objective, spirit and scope of the present invention. All such modifications are intended to be within the scope of the claims appended hereto.

The application's sequence listing, which the Patent Office published only in electronic form, follows.

SEQUENCE LISTING (11492 sequences)

SEQ ID NO: 1 - RNA, 19 nt, Influenza A virus
gccagacagcgaccaaaag

SEQ ID NO: 2 - RNA, 19 nt, Influenza A virus
agccagacagcgaccaaaa

SEQ ID NO: 3 - RNA, 19 nt, Influenza A virus
acagccagacagcgaccaa

SEQ ID NO: 4 - RNA, 19 nt, Influenza A virus
gacagccagacagcgacca

SEQ ID NO: 5 - RNA, 19 nt, Influenza A virus
cagacagcgaccaaaagaa

SEQ ID NO: 6 - RNA, 19 nt, Influenza A virus
cagccagacagcgaccaaa

SEQ ID NO: 7 - RNA, 19 nt, Influenza A virus
agacagcgaccaaaagaau

SEQ ID NO: 8 - RNA, 19 nt, Influenza A virus
ccagacagcgaccaaaaga

SEQ ID NO: 9 - RNA, 19 nt, Influenza A virus
acagcgaccaaaagaauuc

SEQ ID NO: 10 - RNA, 19 nt, Influenza A virus
uacuuacugacagccagac

SEQ ID NO: 11 - RNA, 19 nt, Influenza A virus
cagcgaccaaaagaauucg

SEQ ID NO: 12 - RNA, 19 nt, Influenza A virus
acuuacugacagccagaca

SEQ ID NO: 13 - RNA, 19 nt, Influenza A virus
cauacuuacugacagccag

SEQ ID NO: 14 - RNA, 19 nt, Influenza A virus
cuuacugacagccagacag

SEQ ID NO: 15 - RNA, 19 nt, Influenza A virus
gacagcgaccaaaagaauu

SEQ ID NO: 16 - RNA, 19 nt, Influenza A virus
auacuuacugacagccaga

SEQ ID NO: 17 - RNA, 19 nt, Influenza A virus
acugacagccagacagcga

SEQ ID NO: 18 - RNA, 19 nt, Influenza A virus
gcauacuuacugacagcca

SEQ ID NO: 19 - RNA, 19 nt, Influenza A virus
agcauacuuacugacagcc

SEQ ID NO: 20 - RNA, 19 nt, Influenza A virus
ugacagccagacagcgacc

SEQ ID NO: 21 - RNA, 19 nt, Influenza A virus
uacugacagccagacagcg

SEQ ID NO: 22 - RNA, 19 nt, Influenza A virus
uuacugacagccagacagc

SEQ ID NO: 23 - RNA, 19 nt, Influenza A virus
cugacagccagacagcgac

SEQ ID NO: 24 - RNA, 19 nt, Influenza A virus
acucuagcauacuuacuga

SEQ ID NO: 25 - RNA, 19 nt, Influenza A virus
uagcauacuuacugacagc

SEQ ID NO: 26 - RNA, 19 nt, Influenza A virus
cucuagcauacuuacugac

SEQ ID NO: 27 - RNA, 19 nt, Influenza A virus
cuagcauacuuacugacag

SEQ ID NO: 28 - RNA, 19 nt, Influenza A virus
ucuagcauacuuacugaca

SEQ ID NO: 29 - RNA, 19 nt, Influenza A virus
caaaagaauucggauggcc

SEQ ID NO: 30 - RNA, 19 nt, Influenza A virus
aaaagaauucggauggcca

SEQ ID NO: 31 - RNA, 19 nt, Influenza A virus
gaccaaaagaauucggaug

SEQ ID NO: 32 - RNA, 19 nt, Influenza A virus
cgaccaaaagaauucggau

SEQ ID NO: 33 - RNA, 19 nt, Influenza A virus
aaagaauucggauggccau

SEQ ID NO: 34 - RNA, 19 nt, Influenza A virus
agcgaccaaaagaauucgg

SEQ ID NO: 35 - RNA, 19 nt, Influenza A virus
gcgaccaaaagaauucgga

SEQ ID NO: 36 - RNA, 19 nt, Influenza A virus
ccaaaagaauucggauggc

SEQ ID NO: 37 - RNA, 19 nt, Influenza A virus
accaaaagaauucggaugg

SEQ ID NO: 38 - RNA, 19 nt, Influenza A virus
gaauucggauggccaucaa

SEQ ID NO: 39 - RNA, 19 nt, Influenza A virus
uucggauggccaucaauua

SEQ ID NO: 40 - RNA, 19 nt, Influenza A virus
auucggauggccaucaauu

SEQ ID NO: 41 - RNA, 19 nt, Influenza A virus
gacucuagcauacuuacug

SEQ ID NO: 42 - RNA, 19 nt, Influenza A virus
agaauucggauggccauca

SEQ ID NO: 43 - RNA, 19 nt, Influenza A virus
aagaauucggauggccauc

SEQ ID NO: 44 - RNA, 19 nt, Influenza A virus
aauucggauggccaucaau

SEQ ID NO: 45 - RNA, 19 nt, Influenza A virus
gggacucuagcauacuuac

SEQ ID NO: 46 - RNA, 19 nt, Influenza A virus
acgggacucuagcauacuu

SEQ ID NO: 47 - RNA, 19 nt, Influenza A virus
aaacgggacucuagcauac

SEQ ID NO: 48 - RNA, 19 nt, Influenza A virus
cgggacucuagcauacuua

SEQ ID NO: 49 - RNA, 19 nt, Influenza A virus
aacgggacucuagcauacu

SEQ ID NO: 50 - RNA, 19 nt, Influenza A virus
ggacucuagcauacuuacu

SEQ ID NO: 51 - RNA, 19 nt, Influenza A virus
augaaacgaaaacgggacu

SEQ ID NO: 52 - RNA, 19 nt, Influenza A virus
gaaauggaugauggcaaug

SEQ ID NO: 53 - RNA, 19 nt, Influenza A virus
uggaugauggcaaugaaau

SEQ ID NO: 54 - RNA, 19 nt, Influenza A virus
ugaaauggaugauggcaau

SEQ ID NO: 55 - RNA, 19 nt, Influenza A virus
ggaugauggcaaugaaaua

SEQ ID NO: 56 - RNA, 19 nt, Influenza A virus
ugaaacgaaaacgggacuc

SEQ ID NO: 57 - RNA, 19 nt, Influenza A virus
aaauggaugauggcaauga

SEQ ID NO: 58 - RNA, 19 nt, Influenza A virus
auggaugauggcaaugaaa

SEQ ID NO: 59 - RNA, 19 nt, Influenza A virus
aauggaugauggcaaugaa

SEQ ID NO: 60 - RNA, 19 nt, Influenza A virus
augaaauggaugauggcaa

SEQ ID NO: 61 - RNA, 19 nt, Influenza A virus
gaaacgaaaacgggacucu

SEQ ID NO: 62 - RNA, 19 nt, Influenza A virus
aaacgaaaacgggacucua

SEQ ID NO: 63 - RNA, 19 nt, Influenza A virus
aacgaaaacgggacucuag

SEQ ID NO: 64 - RNA, 19 nt, Influenza A virus
gaaaacgggacucuagcau

SEQ ID NO: 65 - RNA, 19 nt, Influenza A virus
acgaaaacgggacucuagc

SEQ ID NO: 66 - RNA, 19 nt, Influenza A virus
cgaaaacgggacucuagca

SEQ ID NO: 67 - RNA, 19 nt, Influenza A virus
aaaacgggacucuagcaua

SEQ ID NO: 68 - RNA, 19 nt, Influenza A virus
gaaagguuaaaacauggaa

SEQ ID NO: 69 - RNA, 19 nt, Influenza A virus
aaagguuaaaacauggaac

SEQ ID NO: 70 - RNA, 19 nt, Influenza A virus
aagguuaaaacauggaacc

SEQ ID NO: 71 - RNA, 19 nt, Influenza A virus
gguuaaaacauggaaccuu

SEQ ID NO: 72 - RNA, 19 nt, Influenza A virus
agguuaaaacauggaaccu

SEQ ID NO: 73 - RNA, 19 nt, Influenza A virus
cucgcacucgcgagauacu

SEQ ID NO: 74 - RNA, 19 nt, Influenza A virus
ucucgcacucgcgagauac

SEQ ID NO: 75 - RNA, 19 nt, Influenza A virus
uaaaagcaguuagagguga

SEQ ID NO: 76 - RNA, 19 nt, Influenza A virus
ucggauggccaucaauuaa

SEQ ID NO: 77 - RNA, 19 nt, Influenza A virus
aggaugaaauggaugaugg

SEQ ID NO: 78 - RNA, 19 nt, Influenza A virus
ggaugaaauggaugauggc

SEQ ID NO: 79 - RNA, 19 nt, Influenza A virus
uuaggaugaaauggaugau

SEQ ID NO: 80 - RNA, 19 nt, Influenza A virus
augguugcauacauguuag

SEQ ID NO: 81 - RNA, 19 nt, Influenza A virus
uaggaugaaauggaugaug

SEQ ID NO: 82 - RNA, 19 nt, Influenza A virus
ugguugcauacauguuaga

SEQ ID NO: 83 - RNA, 19 nt, Influenza A virus
cuuaggaugaaauggauga

SEQ ID NO: 84 - RNA, 19 nt, Influenza A virus
uugcauacauguuagagag

SEQ ID NO: 85 - RNA, 19 nt, Influenza A virus
acuuaggaugaaauggaug

SEQ ID NO: 86 - RNA, 19 nt, Influenza A virus
guugcauacauguuagaga

SEQ ID NO: 87 - RNA, 19 nt, Influenza A virus
uaaaacauggaaccuuugg

SEQ ID NO: 88 - RNA, 19 nt, Influenza A virus
uuaaaacauggaaccuuug

SEQ ID NO: 89 - RNA, 19 nt, Influenza A virus
gguugcauacauguuagag

SEQ ID NO: 90 - RNA, 19 nt, Influenza A virus
ugaugguugcauacauguu

SEQ ID NO: 91 - RNA, 19 nt, Influenza A virus
augagaauacuuguaaggg

SEQ ID NO: 92 - RNA, 19 nt, Influenza A virus
ugagaauacuuguaagggg

SEQ ID NO: 93 - RNA, 19 nt, Influenza A virus
cacuuaggaugaaauggau

SEQ ID NO: 94 - RNA, 19 nt, Influenza A virus
guuaaaacauggaaccuuu

SEQ ID NO: 95 - RNA, 19 nt, Influenza A virus
uugaugguugcauacaugu

SEQ ID NO: 96 - RNA, 19 nt, Influenza A virus
gaugguugcauacauguua

SEQ ID NO: 97 - RNA, 19 nt, Influenza A virus
ucacuuaggaugaaaugga

SEQ ID NO: 98 - RNA, 19 nt, Influenza A virus
aacauggaaccuuuggccc

SEQ ID NO: 99 - RNA, 19 nt, Influenza A virus
aaacauggaaccuuuggcc

SEQ ID NO: 100 - RNA, 19 nt, Influenza A virus
caagcuguggauauaugca

SEQ ID NO: 101 - RNA, 19 nt, Influenza A virus
aagcuguggauauaugcaa

SEQ ID NO: 102 - RNA, 19 nt, Influenza A virus
aaaacauggaaccuuuggc

SEQ ID NO: 103 - RNA, 19 nt, Influenza A virus
guaaugaaacgaaaacggg

SEQ ID NO: 104 - RNA, 19 nt, Influenza A virus
uaaugaaacgaaaacggga

SEQ ID NO: 105 - RNA, 19 nt, Influenza A virus
aaugaaacgaaaacgggac

SEQ ID NO: 106 - RNA, 19 nt, Influenza A virus
gaugaaauggaugauggca

SEQ ID NO: 107 - RNA, 19 nt, Influenza A virus
aacaagcuguggauauaug

SEQ ID NO: 108 - RNA, 19 nt, Influenza A virus
gaacaagcuguggauauau

SEQ ID NO: 109 - RNA, 19 nt, Influenza A virus
acaagcuguggauauaugc

SEQ ID NO: 110 - RNA, 19 nt, Influenza A virus
uguacacuccagguggaga

SEQ ID NO: 111 - RNA, 19 nt, Influenza A virus
auguacacuccagguggag

SEQ ID NO: 112 - RNA, 19 nt, Influenza A virus
agaacaagcuguggauaua

SEQ ID NO: 113 - RNA, 19 nt, Influenza A virus
gaagaacaagcuguggaua

SEQ ID NO: 114 - RNA, 19 nt, Influenza A virus
aagaacaagcuguggauau

SEQ ID NO: 115 - RNA, 19 nt, Influenza A virus
ugauaaaagcaguuagagg

SEQ ID NO: 116 - RNA, 19 nt, Influenza A virus
augauaaaagcaguuagag

SEQ ID NO: 117 - RNA, 19 nt, Influenza A virus
acaugguggaauagaaaug

SEQ ID NO: 118 - RNA, 19 nt, Influenza A virus
caugguggaauagaaaugg

SEQ ID NO: 119 - RNA, 19 nt, Influenza A virus
cggauggccaucaauuaau

SEQ ID NO: 120 - RNA, 19 nt, Influenza A virus
gauaaaagcaguuagaggu

SEQ ID NO: 121 - RNA, 19 nt, Influenza A virus
auaaaagcaguuagaggug

SEQ ID NO: 122 - RNA, 19 nt, Influenza A virus
auauggccauaauuaagaa

SEQ ID NO: 123 - RNA, 19 nt, Influenza A virus
cauauggccauaauuaaga

SEQ ID NO: 124 - RNA, 19 nt, Influenza A virus
uggaaagaauaaaagaacu

SEQ ID NO: 125 - RNA, 19 nt, Influenza A virus
ugguggaauagaaauggac

SEQ ID NO: 126 - RNA, 19 nt, Influenza A virus
auggaaagaauaaaagaac

SEQ ID NO: 127 - RNA, 19 nt, Influenza A virus
gguggaauagaaauggacc

SEQ ID NO: 128 - RNA, 19 nt, Influenza A virus
ggaaagaauaaaagaacua

SEQ ID NO: 129 - RNA, 19 nt, Influenza A virus
augguggaauagaaaugga

SEQ ID NO: 130 - RNA, 19 nt, Influenza A virus
auggccauaauuaagaagu

SEQ ID NO: 131 - RNA, 19 nt, Influenza A virus
uggccauaauuaagaagua

SEQ ID NO: 132 - RNA, 19 nt, Influenza A virus
agucucgcacucgcgagau

SEQ ID NO: 133 - RNA, 19 nt, Influenza A virus
gucucgcacucgcgagaua

SEQ ID NO: 134 - RNA, 19 nt, Influenza A virus
uauucaacuacaacaagac

SEQ ID NO: 135 - RNA, 19 nt, Influenza A virus
cagucucgcacucgcgaga

SEQ ID NO: 136 - RNA, 19 nt, Influenza A virus
uauggccauaauuaagaag

SEQ ID NO: 137 - RNA, 19 nt, Influenza A virus
gaccauauggccauaauua

SEQ ID NO: 138 - RNA, 19 nt, Influenza A virus
uggaccauauggccauaau

SEQ ID NO: 139 - RNA, 19 nt, Influenza A virus
guauucaacuacaacaaga

SEQ ID NO: 140 - RNA, 19 nt, Influenza A virus
guggaccauauggccauaa

SEQ ID NO: 141 - RNA, 19 nt, Influenza A virus
cauguuagagagagaacuu

SEQ ID NO: 142 - RNA, 19 nt, Influenza A virus
uacauguuagagagagaac

SEQ ID NO: 143 - RNA, 19 nt, Influenza A virus
acauguuagagagagaacu

SEQ ID NO: 144 - RNA, 19 nt, Influenza A virus
accauauggccauaauuaa

SEQ ID NO: 145 - RNA, 19 nt, Influenza A virus
uguuagagagagaacuugu

SEQ ID NO: 146 - RNA, 19 nt, Influenza A virus
auguuagagagagaacuug

SEQ ID NO: 147 - RNA, 19 nt, Influenza A virus
acacuccagguggagaagu

SEQ ID NO: 148 - RNA, 19 nt, Influenza A virus
augucgcagucucgcacuc

SEQ ID NO: 149 - RNA, 19 nt, Influenza A virus
guacacuccagguggagaa

SEQ ID NO: 150 - RNA, 19 nt, Influenza A virus
uacacuccagguggagaag

SEQ ID NO: 151 - RNA, 19 nt, Influenza A virus
ugucgcagucucgcacucg

SEQ ID NO: 152 - RNA, 19 nt, Influenza A virus
ucgcagucucgcacucgcg

SEQ ID NO: 153 - RNA, 19 nt, Influenza A virus
gucgcagucucgcacucgc

SEQ ID NO: 154 - RNA, 19 nt, Influenza A virus
gcagucucgcacucgcgag

SEQ ID NO: 155 - RNA, 19 nt, Influenza A virus
cgcagucucgcacucgcga

SEQ ID NO: 156 - RNA, 19 nt, Influenza A virus
cacuccagguggagaagug

SEQ ID NO: 157 - RNA, 19 nt, Influenza A virus
acuccagguggagaaguga

SEQ ID NO: 158 - RNA, 19 nt, Influenza A virus
gauugcaugauaaaagcag

SEQ ID NO: 159 - RNA, 19 nt, Influenza A virus
ccagguggagaagugagga

SEQ ID NO: 160 - RNA, 19 nt, Influenza A virus
cauacauguuagagagaga

SEQ ID NO: 161 - RNA, 19 nt, Influenza A virus
gcaugauaaaagcaguuag

SEQ ID NO: 162 - RNA, 19 nt, Influenza A virus
auugcaugauaaaagcagu

SEQ ID NO: 163 - RNA, 19 nt, Influenza A virus
gcauacauguuagagagag

SEQ ID NO: 164 - RNA, 19 nt, Influenza A virus
cuccagguggagaagugag

SEQ ID NO: 165 - RNA, 19 nt, Influenza A virus
caugauaaaagcaguuaga

SEQ ID NO: 166 - RNA, 19 nt, Influenza A virus
guggagaagugaggaauga

SEQ ID NO: 167 - RNA, 19 nt, Influenza A virus
ugcaugauaaaagcaguua

SEQ ID NO: 168 - RNA, 19 nt, Influenza A virus
cagguggagaagugaggaa

SEQ ID NO: 169 - RNA, 19 nt, Influenza A virus
gguggagaagugaggaaug

SEQ ID NO: 170 - RNA, 19 nt, Influenza A virus
uugcaugauaaaagcaguu

SEQ ID NO: 171 - RNA, 19 nt, Influenza A virus
agguggagaagugaggaau

SEQ ID NO: 172 - RNA, 19 nt, Influenza A virus
ugcauacauguuagagaga

SEQ ID NO: 173 - RNA, 19 nt, Influenza A virus
aaagaauaaaagaacuacg

SEQ ID NO: 174 - RNA, 19 nt, Influenza A virus
gagaugugccacagcacac

SEQ ID NO: 175 - RNA, 19 nt, Influenza A virus
uaagagucagcaaaauggg

SEQ ID NO: 176 - RNA, 19 nt, Influenza A virus
ccauauggccauaauuaag

SEQ ID NO: 177 - RNA, 19 nt, Influenza A virus
gauuucucccaguugcugg

SEQ ID NO: 178 - RNA, 19 nt, Influenza A virus
agauuucucccaguugcug

SEQ ID NO: 179 - RNA, 19 nt, Influenza A virus
aggaggucagugaaacaca

SEQ ID NO: 180 - RNA, 19 nt, Influenza A virus
gaggaggucagugaaacac

SEQ ID NO: 181 - RNA, 19 nt, Influenza A virus
gaaagaauaaaagaacuac

SEQ ID NO: 182 - RNA, 19 nt, Influenza A virus
auacauguuagagagagaa

SEQ ID NO: 183 - RNA, 19 nt, Influenza A virus
agggaugagaauacuugua

SEQ ID NO: 184 - RNA, 19 nt, Influenza A virus
uaugcaaggcugcaauggg

SEQ ID NO: 185 - RNA, 19 nt, Influenza A virus
ggaugagaauacuuguaag

SEQ ID NO: 186 - RNA, 19 nt, Influenza A virus
gcacagagaugucaaugag

SEQ ID NO: 187 - RNA, 19 nt, Influenza A virus
gaaaagaacccgucacuua

SEQ ID NO: 188 - RNA, 19 nt, Influenza A virus
agcacagagaugucaauga

SEQ ID NO: 189 - RNA, 19 nt, Influenza A virus
auaugcaaggcugcaaugg

SEQ ID NO: 190 - RNA, 19 nt, Influenza A virus
gggaugagaauacuuguaa

SEQ ID NO: 191 - RNA, 19 nt, Influenza A virus
aaaagaacccgucacuuag

SEQ ID NO: 192 - RNA, 19 nt, Influenza A virus
ucagggaugagaauacuug

SEQ ID NO: 193 - RNA, 19 nt, Influenza A virus
cagggaugagaauacuugu

SEQ ID NO: 194 - RNA, 19 nt, Influenza A virus
ccaagcacagagaugucaa

SEQ ID NO: 195 - RNA, 19 nt, Influenza A virus
caggaaaagaacccgucac

SEQ ID NO: 196 - RNA, 19 nt, Influenza A virus
ccacaguggaccauauggc

SEQ ID NO: 197 - RNA, 19 nt, Influenza A virus
aggaaaagaacccgucacu

SEQ ID NO: 198 - RNA, 19 nt, Influenza A virus
accacaguggaccauaugg

SEQ ID NO: 199 - RNA, 19 nt, Influenza A virus
caguggaccauauggccau

SEQ ID NO: 200 - RNA, 19 nt, Influenza A virus
gaauacuuguaaggggcaa

SEQ ID NO: 201 - RNA, 19 nt, Influenza A virus
agaugugccacagcacaca

SEQ ID NO: 202 - RNA, 19 nt, Influenza A virus
ggaaaagaacccgucacuu

SEQ ID NO: 203 - RNA, 19 nt, Influenza A virus
aagcacagagaugucaaug

SEQ ID NO: 204 - RNA, 19 nt, Influenza A virus
agaauacuuguaaggggca

SEQ ID NO: 205 - RNA, 19 nt, Influenza A virus
ggaccauauggccauaauu

SEQ ID NO: 206 - RNA, 19 nt, Influenza A virus
acaguggaccauauggcca

SEQ ID NO: 207 - RNA, 19 nt, Influenza A virus
aguggaccauauggccaua

SEQ ID NO: 208 - RNA, 19 nt, Influenza A virus
caagcacagagaugucaau

SEQ ID NO: 209 - RNA, 19 nt, Influenza A virus
gagaauacuuguaaggggc

SEQ ID NO: 210 - RNA, 19 nt, Influenza A virus
gacaggaaaagaacccguc

SEQ ID NO: 211 - RNA, 19 nt, Influenza A virus
aucgagugaugguaucacc

SEQ ID NO: 212 - RNA, 19 nt, Influenza A virus
gcuguggauauaugcaagg

SEQ ID NO: 213 - RNA, 19 nt, Influenza A virus
ggauauaugcaaggcugca

SEQ ID NO: 214 - RNA, 19 nt, Influenza A virus
uggauauaugcaaggcugc

SEQ ID NO: 215 - RNA, 19 nt, Influenza A virus
agacaggaaaagaacccgu

SEQ ID NO: 216 - RNA, 19 nt, Influenza A virus
acaaaaaccacaguggacc

SEQ ID NO: 217 - RNA, 19 nt, Influenza A virus
uuugcagccgcuccaccaa

SEQ ID NO: 218 - RNA, 19 nt, Influenza A virus
cuguggauauaugcaaggc

SEQ ID NO: 219 - RNA, 19 nt, Influenza A virus
guggauauaugcaaggcug

SEQ ID NO: 220 - RNA, 19 nt, Influenza A virus
acaggaaaagaacccguca

SEQ ID NO: 221 - RNA, 19 nt, Influenza A virus
cagagaugucaaugagagg

SEQ ID NO: 222 - RNA, 19 nt, Influenza A virus
gaucgagugaugguaucac

SEQ ID NO: 223 - RNA, 19 nt, Influenza A virus
uauaugcaaggcugcaaug

SEQ ID NO: 224 - RNA, 19 nt, Influenza A virus
auauaugcaaggcugcaau

SEQ ID NO: 225 - RNA, 19 nt, Influenza A virus
uccagguggagaagugagg

SEQ ID NO: 226 - RNA, 19 nt, Influenza A virus
caaaaaccacaguggacca

SEQ ID NO: 227 - RNA, 19 nt, Influenza A virus
uugcagccgcuccaccaaa

SEQ ID NO: 228 - RNA, 19 nt, Influenza A virus
uacucagaaaagcaaccag

SEQ ID NO: 229 - RNA, 19 nt, Influenza A virus
auaauuaagaaguacacau

SEQ ID NO: 230 - RNA, 19 nt, Influenza A virus
aaaaaccacaguggaccau

SEQ ID NO: 231 - RNA, 19 nt, Influenza A virus
auacucagaaaagcaacca

SEQ ID NO: 232 - RNA, 19 nt, Influenza A virus
gauauaugcaaggcugcaa

SEQ ID NO: 233 - RNA, 19 nt, Influenza A virus
aaaaccacaguggaccaua

SEQ ID NO: 234 - RNA, 19 nt, Influenza A virus
aagaauaaaagaacuacgg

SEQ ID NO: 235 - RNA, 19 nt, Influenza A virus
uacaacaaaauggaauuug

SEQ ID NO: 236 - RNA, 19 nt, Influenza A virus
acaacaaaauggaauuuga

SEQ ID NO: 237 - RNA, 19 nt, Influenza A virus
aaaccacaguggaccauau

SEQ ID NO: 238 - RNA, 19 nt, Influenza A virus
cacaguggaccauauggcc

SEQ ID NO: 239 - RNA, 19 nt, Influenza A virus
cacagagaugucaaugaga

SEQ ID NO: 240 - RNA, 19 nt, Influenza A virus
uaauuaagaaguacacauc

SEQ ID NO: 241 - RNA, 19 nt, Influenza A virus
acagagaugucaaugagag

SEQ ID NO: 242 - RNA, 19 nt, Influenza A virus
aaccacaguggaccauaug

SEQ ID NO: 243 - RNA, 19 nt, Influenza A virus
aucagggaugagaauacuu

SEQ ID NO: 244 - RNA, 19 nt, Influenza A virus
agaauaaaagaacuacgga

SEQ ID NO: 245 - RNA, 19 nt, Influenza A virus
auacuuguaaggggcaauu

SEQ ID NO: 246 - RNA, 19 nt, Influenza A virus
gaucagggaugagaauacu

SEQ ID NO: 247 - RNA, 19 nt, Influenza A virus
agcuguggauauaugcaag

SEQ ID NO: 248 - RNA, 19 nt, Influenza A virus
ccauaauuaagaaguacac

SEQ ID NO: 249 - RNA, 19 nt, Influenza A virus
uguggauauaugcaaggcu

SEQ ID NO: 250 - RNA, 19 nt, Influenza A virus
uacuuguaaggggcaauuc

SEQ ID NO: 251 - RNA, 19 nt, Influenza A virus
aauacuuguaaggggcaau

SEQ ID NO: 252 - RNA, 19 nt, Influenza A virus
ggaucagggaugagaauac

SEQ ID NO: 253 - RNA, 19 nt, Influenza A virus
cauaauuaagaaguacaca

SEQ ID NO: 254 - RNA, 19 nt, Influenza A virus
acccgucacuuaggaugaa

SEQ ID NO: 255 - RNA, 19 nt, Influenza A virus
ccgucacuuaggaugaaau

SEQ ID NO: 256 - RNA, 19 nt, Influenza A virus
gucacuuaggaugaaaugg

SEQ ID NO: 257 - RNA, 19 nt, Influenza A virus
gccauaauuaagaaguaca

SEQ ID NO: 258 - RNA, 19 nt, Influenza A virus
cgucacuuaggaugaaaug

SEQ ID NO: 259 - RNA, 19 nt, Influenza A virus
cccgucacuuaggaugaaa

SEQ ID NO: 260 - RNA, 19 nt, Influenza A virus
ggccauaauuaagaaguac

SEQ ID NO: 261 - RNA, 19 nt, Influenza A virus
aacccgucacuuaggauga

SEQ ID NO: 262 - RNA, 19 nt, Influenza A virus
ugguaaugaaacgaaaacg

SEQ ID NO: 263 - RNA, 19 nt, Influenza A virus
uugguaaugaaacgaaaac

SEQ ID NO: 264 - RNA, 19 nt, Influenza A virus
aggggaucagggaugagaa

SEQ ID NO: 265 - RNA, 19 nt, Influenza A virus
aggucagugaaacacaggg

SEQ ID NO: 266 - RNA, 19 nt, Influenza A virus
ggggaucagggaugagaau

SEQ ID NO: 267 - RNA, 19 nt, Influenza A virus
gaggucagugaaacacagg

SEQ ID NO: 268 - RNA, 19 nt, Influenza A virus
uuguaaggggcaauucucc

SEQ ID NO: 269 - RNA, 19 nt, Influenza A virus
gggagacaggaaaagaacc

SEQ ID NO: 270 - RNA, 19 nt, Influenza A virus
ggagacaggaaaagaaccc

SEQ ID NO: 271 - RNA, 19 nt, Influenza A virus
gggaucagggaugagaaua

SEQ ID NO: 272 - RNA, 19 nt, Influenza A virus
cuuguaaggggcaauucuc

SEQ ID NO: 273 - RNA, 19 nt, Influenza A virus
acuuguaaggggcaauucu

SEQ ID NO: 274 - RNA, 19 nt, Influenza A virus
agaaucagcucauccuuca

SEQ ID NO: 275 - RNA, 19 nt, Influenza A virus
gguaaugaaacgaaaacgg

SEQ ID NO: 276 - RNA, 19 nt, Influenza A virus
ugaggggaucagggaugag

SEQ ID NO: 277 - RNA, 19 nt, Influenza A virus
gugaggggaucagggauga

SEQ ID NO: 278 - RNA, 19 nt, Influenza A virus
augugaggggaucagggau

SEQ ID NO: 279 - RNA, 19 nt, Influenza A virus
gaggggaucagggaugaga

SEQ ID NO: 280 - RNA, 19 nt, Influenza A virus
accacccagauaauaaagc

SEQ ID NO: 281 - RNA, 19 nt, Influenza A virus
aaugugaggggaucaggga

SEQ ID NO: 282 - RNA, 19 nt, Influenza A virus
ccacccagauaauaaagcu

SEQ ID NO: 283 - RNA, 19 nt, Influenza A virus
ugugaggggaucagggaug

SEQ ID NO: 284 - RNA, 19 nt, Influenza A virus
gcuauacucagaaaagcaa

SEQ ID NO: 285 - RNA, 19 nt, Influenza A virus
cuauacucagaaaagcaac

SEQ ID NO: 286 - RNA, 19 nt, Influenza A virus
gaaucagcucauccuucag

SEQ ID NO: 287 - RNA, 19 nt, Influenza A virus
ccugaggaggucagugaaa

SEQ ID NO: 288 - RNA, 19 nt, Influenza A virus
cugaggaggucagugaaac

SEQ ID NO: 289 - RNA, 19 nt, Influenza A virus
uauacucagaaaagcaacc

SEQ ID NO: 290 - RNA, 19 nt, Influenza A virus
caacagcuauacucagaaa

SEQ ID NO: 291 - RNA, 19 nt, Influenza A virus
auggaaccuuuggcccugu

SEQ ID NO: 292 - RNA, 19 nt, Influenza A virus
gcaacagcuauacucagaa

SEQ ID NO: 293 - RNA, 19 nt, Influenza A virus
auaagagucagcaaaaugg

SEQ ID NO: 294 - RNA, 19 nt, Influenza A virus
ugaggaggucagugaaaca

SEQ ID NO: 295 - RNA, 19 nt, Influenza A virus
uuuuaaggcauuuucagaa

SEQ ID NO: 296 - RNA, 19 nt, Influenza A virus
cucuauuccaacaaaugag

SEQ ID NO: 297 - RNA, 19 nt, Influenza A virus
acucuauuccaacaaauga

SEQ ID NO: 298 - RNA, 19 nt, Influenza A virus
gaacccgucacuuaggaug

SEQ ID NO: 299 - RNA, 19 nt, Influenza A virus
aagaacccgucacuuagga

SEQ ID NO: 300 - RNA, 19 nt, Influenza A virus
agaacccgucacuuaggau

SEQ ID NO: 301 - RNA, 19 nt, Influenza A virus
aacagcuauacucagaaaa

SEQ ID NO: 302 - RNA, 19 nt, Influenza A virus
agauaauaaagcuucuccc

SEQ ID NO: 303 - RNA, 19 nt, Influenza A virus
cccagauaauaaagcuucu

SEQ ID NO: 304 - RNA, 19 nt, Influenza A virus
cagauaauaaagcuucucc

SEQ ID NO: 305 - RNA, 19 nt, Influenza A virus
cuuuuaaggcauuuucaga

SEQ ID NO: 306 - RNA, 19 nt, Influenza A virus
guaauuauggaaguuguuu

SEQ ID NO: 307 - RNA, 19 nt, Influenza A virus
acccagauaauaaagcuuc

SEQ ID NO: 308 - RNA, 19 nt, Influenza A virus
auguaauuauggaaguugu

SEQ ID NO: 309 - RNA, 19 nt, Influenza A virus
ccuggucaugcagaccuca

SEQ ID NO: 310 - RNA, 19 nt, Influenza A virus
gauguaauuauggaaguug

SEQ ID NO: 311 - RNA, 19 nt, Influenza A virus
uccugaggaggucagugaa

SEQ ID NO: 312 - RNA, 19 nt, Influenza A virus
cuccugaggaggucaguga

SEQ ID NO: 313 - RNA, 19 nt, Influenza A virus
uaauuauggaaguuguuuu

SEQ ID NO: 314 - RNA, 19 nt, Influenza A virus
cacccagauaauaaagcuu

SEQ ID NO: 315 - RNA, 19 nt, Influenza A virus
uggagaugugccacagcac

SEQ ID NO: 316 - RNA, 19 nt, Influenza A virus
ucuccugaggaggucagug

SEQ ID NO: 317 - RNA, 19 nt, Influenza A virus
acagcuauacucagaaaag

SEQ ID NO: 318 - RNA, 19 nt, Influenza A virus
ccacuagcaucuuuauugg

SEQ ID NO: 319 - RNA, 19 nt, Influenza A virus
cacuagcaucuuuauugga

SEQ ID NO: 320 - RNA, 19 nt, Influenza A virus
cuggucaugcagaccucag

SEQ ID NO: 321 - RNA, 19 nt, Influenza A virus
cauggaaccuuuggcccug

SEQ ID NO: 322 - RNA, 19 nt, Influenza A virus
uguaauuauggaaguuguu

SEQ ID NO: 323 - RNA, 19 nt, Influenza A virus
cagcuauacucagaaaagc

SEQ ID NO: 324 - RNA, 19 nt, Influenza A virus
auucuccuguauucaacua

SEQ ID NO: 325 - RNA, 19 nt, Influenza A virus
aaagaacccgucacuuagg

SEQ ID NO: 326 - RNA, 19 nt, Influenza A virus
uuggagaugugccacagca

SEQ ID NO: 327 - RNA, 19 nt, Influenza A virus
aauucuccuguauucaacu

SEQ ID NO: 328 - RNA, 19 nt, Influenza A virus
acauggaaccuuuggcccu

SEQ ID NO: 329 - RNA, 19 nt, Influenza A virus
ggagaugugccacagcaca

SEQ ID NO: 330 - RNA, 19 nt, Influenza A virus
ucagaucgagugaugguau

SEQ ID NO: 331 - RNA, 19 nt, Influenza A virus
uauuggagaugugccacag

SEQ ID NO: 332 - RNA, 19 nt, Influenza A virus
agaucgagugaugguauca

SEQ ID NO: 333 - RNA, 19 nt, Influenza A virus
cagaucgagugaugguauc

SEQ ID NO: 334 - RNA, 19 nt, Influenza A virus
ccagauaauaaagcuucuc

SEQ ID NO: 335 - RNA, 19 nt, Influenza A virus
auuggagaugugccacagc

SEQ ID NO: 336 - RNA, 19 nt, Influenza A virus
agcuauacucagaaaagca

SEQ ID NO: 337 - RNA, 19 nt, Influenza A virus
ggcaauucuccuguauuca

SEQ ID NO: 338 - RNA, 19 nt, Influenza A virus
cuuuauuggagaugugcca

SEQ ID NO: 339 - RNA, 19 nt, Influenza A virus
uuauuggagaugugccaca

SEQ ID NO: 340 - RNA, 19 nt, Influenza A virus
uccaagcacagagauguca

SEQ ID NO: 341 - RNA, 19 nt, Influenza A virus
ucuuuauuggagaugugcc

SEQ ID NO: 342 - RNA, 19 nt, Influenza A virus
gcaauucuccuguauucaa

SEQ ID NO: 343 - RNA, 19 nt, Influenza A virus
cuccaagcacagagauguc

SEQ ID NO: 344 - RNA, 19 nt, Influenza A virus
gccaugguguuuucacaag

SEQ ID NO: 345 - RNA, 19 nt, Influenza A virus
gagacaggaaaagaacccg

SEQ ID NO: 346 - RNA, 19 nt, Influenza A virus
uuuauuggagaugugccac

SEQ ID NO: 347 - RNA, 19 nt, Influenza A virus
caucuuuauuggagaugug

SEQ ID NO: 348 - RNA, 19 nt, Influenza A virus
ccaugguguuuucacaaga

SEQ ID NO: 349 - RNA, 19 nt, Influenza A virus
ggaggucagugaaacacag

SEQ ID NO: 350 - RNA, 19 nt, Influenza A virus
aaaauucaauggucucaga

SEQ ID NO: 351 - RNA, 19 nt, Influenza A virus
aaauucaauggucucagaa

SEQ ID NO: 352 - RNA, 19 nt, Influenza A virus
agcaucuuuauuggagaug

SEQ ID NO: 353 - RNA, 19 nt, Influenza A virus
augacuccaagcacagaga

SEQ ID NO: 354 - RNA, 19 nt, Influenza A virus
cuagcaucuuuauuggaga

SEQ ID NO: 355 - RNA, 19 nt, Influenza A virus
gcaucuuuauuggagaugu

SEQ ID NO: 356 - RNA, 19 nt, Influenza A virus
gacauaaacccuggucaug

SEQ ID NO: 357 - RNA, 19 nt, Influenza A virus
uaucuccugaggaggucag

SEQ ID NO: 358 - RNA, 19 nt, Influenza A virus
caauucuccuguauucaac

SEQ ID NO: 359 - RNA, 19 nt, Influenza A virus
gaugagaauacuuguaagg

SEQ ID NO: 360 - RNA, 19 nt, Influenza A virus
uagcaucuuuauuggagau

SEQ ID NO: 361 - RNA, 19 nt, Influenza A virus
aucuuuauuggagaugugc

SEQ ID NO: 362 - RNA, 19 nt, Influenza A virus
ugacuccaagcacagagau

SEQ ID NO: 363 - RNA, 19 nt, Influenza A virus
aucuccugaggaggucagu

SEQ ID NO: 364 - RNA, 19 nt, Influenza A virus
acauaaacccuggucaugc

SEQ ID NO: 365 - RNA, 19 nt, Influenza A virus
gagaaucagcucauccuuc

SEQ ID NO: 366 - RNA, 19 nt, Influenza A virus
ugagaaucagcucauccuu

SEQ ID NO: 367 - RNA, 19 nt, Influenza A virus
gacuccaagcacagagaug

SEQ ID NO: 368 - RNA, 19 nt, Influenza A virus
acuagcaucuuuauuggag

SEQ ID NO: 369 - RNA, 19 nt, Influenza A virus
acuccaagcacagagaugu

SEQ ID NO: 370 - RNA, 19 nt, Influenza A virus
aaggaacguguugggaaca

SEQ ID NO: 371 - RNA, 19 nt, Influenza A virus
caaggaacguguugggaac

SEQ ID NO: 372 - RNA, 19 nt, Influenza A virus
ggcaaucuccaaacauuga

SEQ ID NO: 373 - RNA, 19 nt, Influenza A virus
cagccgcuccaccaaagca

SEQ ID NO: 374 - RNA, 19 nt, Influenza A virus
gcagccgcuccaccaaagc

SEQ ID NO: 375 - RNA, 19 nt, Influenza A virus
ggcauuuucagaaagaugc

SEQ ID NO: 376 - RNA, 19 nt, Influenza A virus
aggcauuuucagaaagaug

SEQ ID NO: 377 - RNA, 19 nt, Influenza A virus
uaaggcauuuucagaaaga

SEQ ID NO: 378 - RNA, 19 nt, Influenza A virus
acuuuaauugaagacccag

SEQ ID NO: 379 - RNA, 19 nt, Influenza A virus
aaggcauuuucagaaagau

SEQ ID NO: 380 - RNA, 19 nt, Influenza A virus
uuaaggcauuuucagaaag

SEQ ID NO: 381 - RNA, 19 nt, Influenza A virus
gcaaucuccaaacauugaa

SEQ ID NO: 382 - RNA, 19 nt, Influenza A virus
gcacuuuaauugaagaccc

SEQ ID NO: 383 - RNA, 19 nt, Influenza A virus
cacuuuaauugaagaccca

SEQ ID NO: 384 - RNA, 19 nt, Influenza A virus
cuuuaauugaagacccaga

SEQ ID NO: 385 - RNA, 19 nt, Influenza A virus
ggcacuuuaauugaagacc

SEQ ID NO: 386 - RNA, 19 nt, Influenza A virus
uuuaaggcauuuucagaaa

SEQ ID NO: 387 - RNA, 19 nt, Influenza A virus
uuuaauugaagacccagau

SEQ ID NO: 388 - RNA, 19 nt, Influenza A virus
uuugagaguucgagaccaa

SEQ ID NO: 389 - RNA, 19 nt, Influenza A virus
uuuuugagaguucgagacc

SEQ ID NO: 390 - RNA, 19 nt, Influenza A virus
gccgcuccaccaaagcaaa

SEQ ID NO: 391 - RNA, 19 nt, Influenza A virus
uuuugagaguucgagacca

SEQ ID NO: 392 - RNA, 19 nt, Influenza A virus
agccgcuccaccaaagcaa

SEQ ID NO: 393 - RNA, 19 nt, Influenza A virus
uuaauugaagacccagaug

SEQ ID NO: 394 - RNA, 19 nt, Influenza A virus
ugcagccgcuccaccaaag

SEQ ID NO: 395 - RNA, 19 nt, Influenza A virus
ccgcuccaccaaagcaaag

SEQ ID NO: 396 - RNA, 19 nt, Influenza A virus
uaauugaagacccagauga

SEQ ID NO: 397 - RNA, 19 nt, Influenza A virus
uugagaguucgagaccaac

SEQ ID NO: 398 - RNA, 19 nt, Influenza A virus
uucacaaugguggggaaaa

SEQ ID NO: 399 - RNA, 19 nt, Influenza A virus
uaaacccuggucaugcaga

SEQ ID NO: 400 - RNA, 19 nt, Influenza A virus
uucaauggucucagaaucc

SEQ ID NO: 401 - RNA, 19 nt, Influenza A virus
ucacaaugguggggaaaag

SEQ ID NO: 402 - RNA, 19 nt, Influenza A virus
ucaauggucucagaauccu

SEQ ID NO: 403 - RNA, 19 nt, Influenza A virus
ucgagugaugguaucaccu

SEQ ID NO: 404 - RNA, 19 nt, Influenza A virus
auucaauggucucagaauc

SEQ ID NO: 405 - RNA, 19 nt, Influenza A virus
aauucaauggucucagaau

SEQ ID NO: 406 - RNA, 19 nt, Influenza A virus
ucagugaaacacagggaac

SEQ ID NO: 407 - RNA, 19 nt, Influenza A virus
auaaacccuggucaugcag

SEQ ID NO: 408 - RNA, 19 nt, Influenza A virus
acccuggucaugcagaccu

SEQ ID NO: 409 - RNA, 19 nt, Influenza A virus
aaacccuggucaugcagac

SEQ ID NO: 410 - RNA, 19 nt, Influenza A virus
aacccuggucaugcagacc

SEQ ID NO: 411 - RNA, 19 nt, Influenza A virus
gucagugaaacacagggaa

SEQ ID NO: 412 - RNA, 19 nt, Influenza A virus
gaggauugcaugauaaaag

SEQ ID NO: 413 - RNA, 19 nt, Influenza A virus
guaaggggcaauucuccug

SEQ ID NO: 414 - RNA, 19 nt, Influenza A virus
aggauugcaugauaaaagc

SEQ ID NO: 415 - RNA, 19 nt, Influenza A virus
uguaaggggcaauucuccu

SEQ ID NO: 416 - RNA, 19 nt, Influenza A virus
cauaaacccuggucaugca

SEQ ID NO: 417 - RNA, 19 nt, Influenza A virus
ugagaguucgagaccaacg

SEQ ID NO: 418 - RNA, 19 nt, Influenza A virus
caagaggauugcaugauaa

SEQ ID NO: 419 - RNA, 19 nt, Influenza A virus
aagaggauugcaugauaaa

SEQ ID NO: 420 - RNA, 19 nt, Influenza A virus
ucacaagaggauugcauga

SEQ ID NO: 421 - RNA, 19 nt, Influenza A virus
uaaggggcaauucuccugu

SEQ ID NO: 422 - RNA, 19 nt, Influenza A virus
ggauugcaugauaaaagca

SEQ ID NO: 423 - RNA, 19 nt, Influenza A virus
cacaagaggauugcaugau

SEQ ID NO: 424 - RNA, 19 nt, Influenza A virus
agaggauugcaugauaaaa

SEQ ID NO: 425 - RNA, 19 nt, Influenza A virus
acaagaggauugcaugaua

SEQ ID NO: 426 - RNA, 19 nt, Influenza A virus
guguuuucacaagaggauu

SEQ ID NO: 427 - RNA, 19 nt, Influenza A virus
uguuuucacaagaggauug

SEQ ID NO: 428 - RNA, 19 nt, Influenza A virus
aagaagugcuuacaggcaa

SEQ ID NO: 429 - RNA, 19 nt, Influenza A virus
uucacaagaggauugcaug

SEQ ID NO: 430 - RNA, 19 nt, Influenza A virus
uuucacaagaggauugcau

SEQ ID NO: 431 - RNA, 19 nt, Influenza A virus
guuuucacaagaggauugc

SEQ ID NO: 432 - RNA, 19 nt, Influenza A virus
gaagaagugcuuacaggca

SEQ ID NO: 433 - RNA, 19 nt, Influenza A virus
uuuucacaagaggauugca

SEQ ID NO: 434 - RNA, 19 nt, Influenza A virus
gccaauacaguggguuugu

SEQ ID NO: 435 - RNA, 19 nt, Influenza A virus
aggggcaauucuccuguau

SEQ ID NO: 436 - RNA, 19 nt, Influenza A virus
uuagaggugaccugaauuu

SEQ ID NO: 437 - RNA, 19 nt, Influenza A virus
uggaauuugaaccauuuca

SEQ ID NO: 438 - RNA, 19 nt, Influenza A virus
ggggcaauucuccuguauu

SEQ ID NO: 439 - RNA, 19 nt, Influenza A virus
aaggggcaauucuccugua

SEQ ID NO: 440 - RNA, 19 nt, Influenza A virus
auggaauuugaaccauuuc

SEQ ID NO: 441 - RNA, 19 nt, Influenza A virus
guuagaggugaccugaauu

SEQ ID NO: 442 - RNA, 19 nt, Influenza A virus
aaaauggaauuugaaccau

SEQ ID NO: 443 - RNA, 19 nt, Influenza A virus
uguacaacaaaauggaauu

SEQ ID NO: 444 - RNA, 19 nt, Influenza A virus
aaauggaauuugaaccauu

SEQ ID NO: 445 - RNA, 19 nt, Influenza A virus
guacaacaaaauggaauuu

SEQ ID NO: 446 - RNA, 19 nt, Influenza A virus
caguuagaggugaccugaa

SEQ ID NO: 447 - RNA, 19 nt, Influenza A virus
gaggugaccugaauuucgu

SEQ ID NO: 448 - RNA, 19 nt, Influenza A virus
agaggugaccugaauuucg

SEQ ID NO: 449 - RNA, 19 nt, Influenza A virus
uagaggugaccugaauuuc

SEQ ID NO: 450 - RNA, 19 nt, Influenza A virus
aaagcaguuagaggugacc

SEQ ID NO: 451 - RNA, 19 nt, Influenza A virus
aagcaguuagaggugaccu

SEQ ID NO: 452 - RNA, 19 nt, Influenza A virus
aaaagcaguuagaggugac

SEQ ID NO: 453 - RNA, 19 nt, Influenza A virus
aguuagaggugaccugaau

SEQ ID NO: 454 - RNA, 19 nt, Influenza A virus
gcaguuagaggugaccuga

SEQ ID NO: 455 - RNA, 19 nt, Influenza A virus
agcaguuagaggugaccug

SEQ ID NO: 456 - RNA, 19 nt, Influenza A virus
aauggaauuugaaccauuu

SEQ ID NO: 457 - RNA, 19 nt, Influenza A virus
ggagaagugaggaaugacg

SEQ ID NO: 458 - RNA, 19 nt, Influenza A virus
gggcaauucuccuguauuc

SEQ ID NO: 459 - RNA, 19 nt, Influenza A virus
gagaagugaggaaugacga

SEQ ID NO: 460 - RNA, 19 nt, Influenza A virus
uggagaagugaggaaugac

SEQ ID NO: 461 - RNA, 19 nt, Influenza A virus
uuguacaacaaaauggaau

SEQ ID NO: 462 - RNA, 19 nt, Influenza A virus
uguuguacaacaaaaugga

SEQ ID NO: 463 - RNA, 19 nt, Influenza A virus
agcauuaagcaucaaugaa

SEQ ID NO: 464 - RNA, 19 nt, Influenza A virus
cagcauuaagcaucaauga

SEQ ID NO: 465 - RNA, 19 nt, Influenza A virus
ccagcauuaagcaucaaug

SEQ ID NO: 466 - RNA, 19 nt, Influenza A virus
auguuguacaacaaaaugg

SEQ ID NO: 467 - RNA, 19 nt, Influenza A virus
ggaguaaaaugagugaugc

SEQ ID NO: 468 - RNA, 19 nt, Influenza A virus
aauugaagacccagaugaa

SEQ ID NO: 469 - RNA, 19 nt, Influenza A virus
uggaguaaaaugagugaug

SEQ ID NO: 470 - RNA, 19 nt, Influenza A virus
uucaacuacaacaagacca

SEQ ID NO: 471 - RNA, 19 nt, Influenza A virus
ucaacuacaacaagaccac

SEQ ID NO: 472 - RNA, 19 nt, Influenza A virus
guuguacaacaaaauggaa

SEQ ID NO: 473 - RNA, 19 nt, Influenza A virus
augguguuuucacaagagg

SEQ ID NO: 474 - RNA, 19 nt, Influenza A virus
auggaguaaaaugagugau

SEQ ID NO: 475 - RNA, 19 nt, Influenza A virus
cuauggaguaaaaugagug

SEQ ID NO: 476 - RNA, 19 nt, Influenza A virus
ugguguuuucacaagagga

SEQ ID NO: 477 - RNA, 19 nt, Influenza A virus
uauggaguaaaaugaguga

SEQ ID NO: 478 - RNA, 19 nt, Influenza A virus
agaagugaggaaugacgau

SEQ ID NO: 479 - RNA, 19 nt, Influenza A virus
caauguuguacaacaaaau

SEQ ID NO: 480 - RNA, 19 nt, Influenza A virus
auucaacuacaacaagacc

SEQ ID NO: 481 - RNA, 19 nt, Influenza A virus
caugguguuuucacaagag

SEQ ID NO: 482 - RNA, 19 nt, Influenza A virus
aauguuguacaacaaaaug

SEQ ID NO: 483 - RNA, 19 nt, Influenza A virus
gguguuuucacaagaggau

SEQ ID NO: 484 - RNA, 19 nt, Influenza A virus
acaaggaugguggacauuc

SEQ ID NO: 485 - RNA, 19 nt, Influenza A virus
caaggaugguggacauucu

SEQ ID NO: 486 - RNA, 19 nt, Influenza A virus
aacuacaacaagaccacua

SEQ ID NO: 487 - RNA, 19 nt, Influenza A virus
acuacaacaagaccacuaa

SEQ ID NO: 488 - RNA, 19 nt, Influenza A virus
gcagauccacuagcaucuu

SEQ ID NO: 489 - RNA, 19 nt, Influenza A virus
cagauccacuagcaucuuu

SEQ ID NO: 490 - RNA, 19 nt, Influenza A virus
gugaugguaucaccuuugg

SEQ ID NO: 491 - RNA, 19 nt, Influenza A virus
ugaugguaucaccuuuggc

SEQ ID NO: 492 - RNA, 19 nt, Influenza A virus
agauacggaccagcauuaa

SEQ ID NO: 493 - RNA, 19 nt, Influenza A virus
gagugaugguaucaccuuu

SEQ ID NO: 494 - RNA, 19 nt, Influenza A virus
auccacuagcaucuuuauu

SEQ ID NO: 495 - RNA, 19 nt, Influenza A virus
gauacggaccagcauuaag

SEQ ID NO: 496 - RNA, 19 nt, Influenza A virus
agauccacuagcaucuuua

SEQ ID NO: 497 - RNA, 19 nt, Influenza A virus
gauccacuagcaucuuuau

SEQ ID NO: 498 - RNA, 19 nt, Influenza A virus
cgagugaugguaucaccuu

SEQ ID NO: 499 - RNA, 19 nt, Influenza A virus
caacuacaacaagaccacu

SEQ ID NO: 500 - RNA, 19 nt, Influenza A virus
uuacaggcaaucuccaaac

SEQ ID NO: 501 - RNA, 19 nt, Influenza A virus
acaggcaaucuccaaacau

SEQ ID NO: 502 - RNA, 19 nt, Influenza A virus
cuuacaggcaaucuccaaa

SEQ ID NO: 503 - RNA, 19 nt, Influenza A virus
uacaggcaaucuccaaaca

SEQ ID NO: 504 - RNA, 19 nt, Influenza A virus
caggcaaucuccaaacauu

SEQ ID NO: 505 - RNA, 19 nt, Influenza A virus
agugaugguaucaccuuug

SEQ ID NO: 506 - RNA, 19 nt, Influenza A virus
aggcaaucuccaaacauug

SEQ ID NO: 507 - RNA, 19 nt, Influenza A virus
uauggaaagaauaaaagaa

SEQ ID NO: 508 - RNA, 19 nt, Influenza A virus
aagauacggaccagcauua

SEQ ID NO: 509 - RNA, 19 nt, Influenza A virus
augcgaaagugcuuuuuca

SEQ ID NO: 510 - RNA, 19 nt, Influenza A virus
uaucaauggaucaucagaa

SEQ ID NO: 511 - RNA, 19 nt, Influenza A virus
ggaugguggacauucuuag

SEQ ID NO: 512 - RNA, 19 nt, Influenza A virus
accuaucaauggaucauca

SEQ ID NO: 513 - RNA, 19 nt, Influenza A virus
gcuuacaggcaaucuccaa

SEQ ID NO: 514 - RNA, 19 nt, Influenza A virus
aaggaugguggacauucuu

SEQ ID NO: 515 - RNA, 19 nt, Influenza A virus
aggaugguggacauucuua

SEQ ID NO: 516 - RNA, 19 nt, Influenza A virus
gaagugcuuacaggcaauc

SEQ ID NO: 517 - RNA, 19 nt, Influenza A virus
aucaauggaucaucagaaa

SEQ ID NO: 518 - RNA, 19 nt, Influenza A virus
ugcuuacaggcaaucucca

SEQ ID NO: 519 - RNA, 19 nt, Influenza A virus
aagugcuuacaggcaaucu

SEQ ID NO: 520 - RNA, 19 nt, Influenza A virus
gaagugaggaaugacgaug

SEQ ID NO: 521 - RNA, 19 nt, Influenza A virus
gugcuuacaggcaaucucc

SEQ ID NO: 522 - RNA, 19 nt, Influenza A virus
aagugaggaaugacgaugu

SEQ ID NO: 523 - RNA, 19 nt, Influenza A virus
agagacugacaauaacuua

SEQ ID NO: 524 - RNA, 19 nt, Influenza A virus
gagagacugacaauaacuu

SEQ ID NO: 525 - RNA, 19 nt, Influenza A virus
agaagugcuuacaggcaau

SEQ ID NO: 526 - RNA, 19 nt, Influenza A virus
gaagauacggaccagcauu

SEQ ID NO: 527 - RNA, 19 nt, Influenza A virus
gaugcgaaagugcuuuuuc

SEQ ID NO: 528 - RNA, 19 nt, Influenza A virus
ucagcucauccuucagcuu

SEQ ID NO: 529 - RNA, 19 nt, Influenza A virus
augugccacagcacacaaa

SEQ ID NO: 530 - RNA, 19 nt, Influenza A virus
aauaccuaucaauggauca

SEQ ID NO: 531 - RNA, 19 nt, Influenza A virus
ccuaucaauggaucaucag

SEQ ID NO: 532 - RNA, 19 nt, Influenza A virus
auaccuaucaauggaucau

SEQ ID NO: 533 - RNA, 19 nt, Influenza A virus
ugugccacagcacacaaau

SEQ ID NO: 534 - RNA, 19 nt, Influenza A virus
agaagauacggaccagcau

SEQ ID NO: 535 - RNA, 19 nt, Influenza A virus
agugcuuacaggcaaucuc

SEQ ID NO: 536 - RNA, 19 nt, Influenza A virus
aucagcucauccuucagcu

SEQ ID NO: 537 - RNA, 19 nt, Influenza A virus
aggaguucacaaugguggg

SEQ ID NO: 538 - RNA, 19 nt, Influenza A virus
gaggaguucacaauggugg

SEQ ID NO: 539 - RNA, 19 nt, Influenza A virus
aaucagcucauccuucagc

SEQ ID NO: 540 - RNA, 19 nt, Influenza A virus
gaugugccacagcacacaa

SEQ ID NO: 541 - RNA, 19 nt, Influenza A virus
agcucauccuucagcuuug

SEQ ID NO: 542 - RNA, 19 nt, Influenza A virus
cuguauucaacuacaacaa

SEQ ID NO: 543 - RNA, 19 nt, Influenza A virus
gcucauccuucagcuuugg

SEQ ID NO: 544 - RNA, 19 nt, Influenza A virus
ucaaugagaggaauaagag

SEQ ID NO: 545 - RNA, 19 nt, Influenza A virus
ugagaggaauaagagucag

SEQ ID NO: 546 - RNA, 19 nt, Influenza A virus
caaugagaggaauaagagu

SEQ ID NO: 547 - RNA, 19 nt, Influenza A virus
gugccacagcacacaaauu

SEQ ID NO: 548 - RNA, 19 nt, Influenza A virus
gaggaauaagagucagcaa

SEQ ID NO: 549 - RNA, 19 nt, Influenza A virus
ccuguauucaacuacaaca

SEQ ID NO: 550 - RNA, 19 nt, Influenza A virus
cagcucauccuucagcuuu

SEQ ID NO: 551 - RNA, 19 nt, Influenza A virus
aaugagaggaauaagaguc

SEQ ID NO: 552 - RNA, 19 nt, Influenza A virus
uguauucaacuacaacaag

SEQ ID NO: 553 - RNA, 19 nt, Influenza A virus
agaggaauaagagucagca

SEQ ID NO: 554 - RNA, 19 nt, Influenza A virus
cuaucaauggaucaucaga

SEQ ID NO: 555 - RNA, 19 nt, Influenza A virus
ggucaauaccuaucaaugg

SEQ ID NO: 556 - RNA, 19 nt, Influenza A virus
gagucagcaaaaugggugu

SEQ ID NO: 557 - RNA, 19 nt, Influenza A virus
augagaggaauaagaguca

SEQ ID NO: 558 - RNA, 19 nt, Influenza A virus
uggucaauaccuaucaaug

SEQ ID NO: 559 - RNA, 19 nt, Influenza A virus
ucuccuguauucaacuaca

SEQ ID NO: 560 - RNA, 19 nt, Influenza A virus
agagucagcaaaaugggug

SEQ ID NO: 561 - RNA, 19 nt, Influenza A virus
gccacagcacacaaauugg

SEQ ID NO: 562 - RNA, 19 nt, Influenza A virus
cuccuguauucaacuacaa

SEQ ID NO: 563 - RNA, 19 nt, Influenza A virus
gucaaugagaggaauaaga

SEQ ID NO: 564 - RNA, 19 nt, Influenza A virus
agagaugucaaugagagga

SEQ ID NO: 565 - RNA, 19 nt, Influenza A virus
ugucaaugagaggaauaag

SEQ ID NO: 566 - RNA, 19 nt, Influenza A virus
ggauggccaucaauuaaug

SEQ ID NO: 567 - RNA, 19 nt, Influenza A virus
gagaggaauaagagucagc

SEQ ID NO: 568 - RNA, 19 nt, Influenza A virus
ugccacagcacacaaauug

SEQ ID NO: 569 - RNA, 19 nt, Influenza A virus
ggaauaagagucagcaaaa

SEQ ID NO: 570 - RNA, 19 nt, Influenza A virus
uaccuaucaauggaucauc

SEQ ID NO: 571 - RNA, 19 nt, Influenza A virus
uuggcgggacaaggauggu

SEQ ID NO: 572 - RNA, 19 nt, Influenza A virus
auuggcgggacaaggaugg

SEQ ID NO: 573 - RNA, 19 nt, Influenza A virus
ucaauaccuaucaauggau

SEQ ID NO: 574 - RNA, 19 nt, Influenza A virus
augcagaccucagugccaa

SEQ ID NO: 575 - RNA, 19 nt, Influenza A virus
caaggacaaacucuaugga

SEQ ID NO: 576 - RNA, 19 nt, Influenza A virus
aaggacaaacucuauggag

SEQ ID NO: 577 - RNA, 19 nt, Influenza A virus
aggaauaagagucagcaaa

SEQ ID NO: 578 - RNA, 19 nt, Influenza A virus
gaguucacaauggugggga

SEQ ID NO: 579 - RNA, 19 nt, Influenza A virus
aauaagagucagcaaaaug

SEQ ID NO: 580 - RNA, 19 nt, Influenza A virus
aguucacaaugguggggaa

SEQ ID NO: 581 - RNA, 19 nt, Influenza A virus
gaauaagagucagcaaaau

SEQ ID NO: 582 - RNA, 19 nt, Influenza A virus
augucaaugagaggaauaa

SEQ ID NO: 583 - RNA, 19 nt, Influenza A virus
uuggucaauaccuaucaau

SEQ ID NO: 584 - RNA, 19 nt, Influenza A virus
guucacaaugguggggaaa

SEQ ID NO: 585 - RNA, 19 nt, Influenza A virus
uccuguauucaacuacaac

SEQ ID NO: 586 - RNA, 19 nt, Influenza A virus
uucuccuguauucaacuac

SEQ ID NO: 587 - RNA, 19 nt, Influenza A virus
caugcagaccucagugcca

SEQ ID NO: 588 - RNA, 19 nt, Influenza A virus
ugaggaaugacgauguuga

SEQ ID NO: 589 - RNA, 19 nt, Influenza A virus
gauggccaucaauuaaugu

SEQ ID NO: 590 - RNA, 19 nt, Influenza A virus
gugaggaaugacgauguug

SEQ ID NO: 591 - RNA, 19 nt, Influenza A virus
gucaauaccuaucaaugga

SEQ ID NO: 592 - RNA, 19 nt, Influenza A virus
agugaggaaugacgauguu

SEQ ID NO: 593 - RNA, 19 nt, Influenza A virus
ggaguucacaauggugggg

SEQ ID NO: 594 - RNA, 19 nt, Influenza A virus
ccacagcacacaaauuggc

SEQ ID NO: 595 - RNA, 19 nt, Influenza A virus
agaacucuauuccaacaaa

SEQ ID NO: 596 - RNA, 19 nt, Influenza A virus
gaugucaaugagaggaaua

SEQ ID NO: 597 - RNA, 19 nt, Influenza A virus
gaacucuauuccaacaaau

SEQ ID NO: 598 - RNA, 19 nt, Influenza A virus
ggucagugaaacacaggga

SEQ ID NO: 599 - RNA, 19 nt, Influenza A virus
agaugucaaugagaggaau

SEQ ID NO: 600 - RNA, 19 nt, Influenza A virus
gagaugucaaugagaggaa

SEQ ID NO: 601 - RNA, 19 nt, Influenza A virus
aacucuauuccaacaaaug

SEQ ID NO: 602 - RNA, 19 nt, Influenza A virus
gggacaaggaugguggaca

SEQ ID NO: 603 - RNA, 19 nt, Influenza A virus
caaacucuauggaguaaaa

SEQ ID NO: 604 - RNA, 19 nt, Influenza A virus
ggacaaggaugguggacau

SEQ ID NO: 605 - RNA, 19 nt, Influenza A virus
acagcacacaaauuggcgg

SEQ ID NO: 606 - RNA, 19 nt, Influenza A virus
cacagcacacaaauuggcg

SEQ ID NO: 607 - RNA, 19 nt, Influenza A virus
caauaccuaucaauggauc

SEQ ID NO: 608 - RNA, 19 nt, Influenza A virus
gacaaggaugguggacauu

SEQ ID NO: 609 - RNA, 19 nt, Influenza A virus
aaacucuauggaguaaaau

SEQ ID NO: 610 - RNA, 19 nt, Influenza A virus
caaaauggaauuugaacca

SEQ ID NO: 611 - RNA, 19 nt, Influenza A virus
uguugggaacaaauguaca

SEQ ID NO: 612 - RNA, 19 nt, Influenza A virus
aacaaaauggaauuugaac

SEQ ID NO: 613 - RNA, 19 nt, Influenza A virus
aacucuauggaguaaaaug

SEQ ID NO: 614 - RNA, 19 nt, Influenza A virus
acaaaauggaauuugaacc

SEQ ID NO: 615 - RNA, 19 nt, Influenza A virus
cacacaaauuggcgggaca

SEQ ID NO: 616 - RNA, 19 nt, Influenza A virus
guugggaacaaauguacac

SEQ ID NO: 617 - RNA, 19 nt, Influenza A virus
gcacacaaauuggcgggac

SEQ ID NO: 618 - RNA, 19 nt, Influenza A virus
cagaaagaugcgaaagugc

SEQ ID NO: 619 - RNA, 19 nt, Influenza A virus
agcacacaaauuggcggga

SEQ ID NO: 620 - RNA, 19 nt, Influenza A virus
aaagaugcgaaagugcuuu

SEQ ID NO: 621 - RNA, 19 nt, Influenza A virus
agaaagaugcgaaagugcu

SEQ ID NO: 622 - RNA, 19 nt, Influenza A virus
aagaugcgaaagugcuuuu

SEQ ID NO: 623 - RNA, 19 nt, Influenza A virus
gcgggacaaggauggugga

SEQ ID NO: 624 - RNA, 19 nt, Influenza A virus
acacaaauuggcgggacaa

SEQ ID NO: 625 - RNA, 19 nt, Influenza A virus
ugaugucgcagucucgcac

SEQ ID NO: 626 - RNA, 19 nt, Influenza A virus
caacaaaauggaauuugaa

SEQ ID NO: 627 - RNA, 19 nt, Influenza A virus
ggaacaaauguacacucca

SEQ ID NO: 628 - RNA, 19 nt, Influenza A virus
caaauguacacuccaggug

SEQ ID NO: 629 - RNA, 19 nt, Influenza A virus
cugaugucgcagucucgca

SEQ ID NO: 630 - RNA, 19 nt, Influenza A virus
cgggacaaggaugguggac

SEQ ID NO: 631 - RNA, 19 nt, Influenza A virus
gggaacaaauguacacucc

SEQ ID NO: 632 - RNA, 19 nt, Influenza A virus
uugggaacaaauguacacu

SEQ ID NO: 633 - RNA, 19 nt, Influenza A virus
gaacaaauguacacuccag

SEQ ID NO: 634 - RNA, 19 nt, Influenza A virus
aaauguacacuccaggugg

SEQ ID NO: 635 - RNA, 19 nt, Influenza A virus
gaaagaugcgaaagugcuu

SEQ ID NO: 636 - RNA, 19 nt, Influenza A virus
ugggaacaaauguacacuc

SEQ ID NO: 637 - RNA, 19 nt, Influenza A virus
acaaauguacacuccaggu

SEQ ID NO: 638 - RNA, 19 nt, Influenza A virus
gaguagacauaaacccugg

SEQ ID NO: 639 - RNA, 19 nt, Influenza A virus
aacaaauguacacuccagg

SEQ ID NO: 640 - RNA, 19 nt, Influenza A virus
agaguagacauaaacccug

SEQ ID NO: 641 - RNA, 19 nt, Influenza A virus
auuuuagaaaucaagucaa

SEQ ID NO: 642 - RNA, 19 nt, Influenza A virus
aagaguagacauaaacccu

SEQ ID NO: 643 - RNA, 19 nt, Influenza A virus
cauuuuagaaaucaaguca

SEQ ID NO: 644 - RNA, 19 nt, Influenza A virus
gaagaguagacauaaaccc

SEQ ID NO: 645 - RNA, 19 nt, Influenza A virus
ugaagacccagaugaaagc

SEQ ID NO: 646 - RNA, 19 nt, Influenza A virus
ggcgggacaaggauggugg

SEQ ID NO: 647 - RNA, 19 nt, Influenza A virus
aagacccagaugaaagcac

SEQ ID NO: 648 - RNA, 19 nt, Influenza A virus
aauguacacuccaggugga

SEQ ID NO: 649 - RNA, 19 nt, Influenza A virus
gaugucgcagucucgcacu

SEQ ID NO: 650 - RNA, 19 nt, Influenza A virus
uggcgggacaaggauggug

SEQ ID NO: 651 - RNA, 19 nt, Influenza A virus
gaagacccagaugaaagca

SEQ ID NO: 652 - RNA, 19 nt, Influenza A virus
cauuuucagaaagaugcga

SEQ ID NO: 653 - RNA, 19 nt, Influenza A virus
uuuucagaaagaugcgaaa

SEQ ID NO: 654 - RNA, 19 nt, Influenza A virus
auuuucagaaagaugcgaa

SEQ ID NO: 655 - RNA, 19 nt, Influenza A virus
agaccacuaaaagacuaac

SEQ ID NO: 656 - RNA, 19 nt, Influenza A virus
uuucagaaagaugcgaaag

SEQ ID NO: 657 - RNA, 19 nt, Influenza A virus
aagaccacuaaaagacuaa

SEQ ID NO: 658 - RNA, 19 nt, Influenza A virus
auugaagacccagaugaaa

SEQ ID NO: 659 - RNA, 19 nt, Influenza A virus
aacaagaccacuaaaagac

SEQ ID NO: 660 - RNA, 19 nt, Influenza A virus
acaagaccacuaaaagacu

SEQ ID NO: 661 - RNA, 19 nt, Influenza A virus
cagcacacaaauuggcggg

SEQ ID NO: 662 - RNA, 19 nt, Influenza A virus
agacccagaugaaagcaca

SEQ ID NO: 663 - RNA, 19 nt, Influenza A virus
gaccacuaaaagacuaaca

SEQ ID NO: 664 - RNA, 19 nt, Influenza A virus
uucagaaagaugcgaaagu

SEQ ID NO: 665 - RNA, 19 nt, Influenza A virus
guagacauaaacccugguc

SEQ ID NO: 666 - RNA, 19 nt, Influenza A virus
acccagaugaaagcacauc

SEQ ID NO: 667 - RNA, 19 nt, Influenza A virus
uagacauaaacccugguca

SEQ ID NO: 668 - RNA, 19 nt, Influenza A virus
caagaccacuaaaagacua

SEQ ID NO: 669 - RNA, 19 nt, Influenza A virus
uggucaugcagaccucagu

SEQ ID NO: 670 - RNA, 19 nt, Influenza A virus
ggucaugcagaccucagug

SEQ ID NO: 671 - RNA, 19 nt, Influenza A virus
ucagaaagaugcgaaagug

SEQ ID NO: 672 - RNA, 19 nt, Influenza A virus
gcacauccggaguggaguc

SEQ ID NO: 673 - RNA, 19 nt, Influenza A virus
gucaugcagaccucagugc

SEQ ID NO: 674 - RNA, 19 nt, Influenza A virus
gacccagaugaaagcacau

SEQ ID NO: 675 - RNA, 19 nt, Influenza A virus
guguugggaacaaauguac

SEQ ID NO: 676 - RNA, 19 nt, Influenza A virus
agcaguauauacauugaag

SEQ ID NO: 677 - RNA, 19 nt, Influenza A virus
guggugguuagcauugauc

SEQ ID NO: 678 - RNA, 19 nt, Influenza A virus
agcuucucccuuuugcagc

SEQ ID NO: 679 - RNA, 19 nt, Influenza A virus
uggugguuagcauugaucg

SEQ ID NO: 680 - RNA, 19 nt, Influenza A virus
ggauacuaacaucagaauc

SEQ ID NO: 681 - RNA, 19 nt, Influenza A virus
cguguugggaacaaaugua

SEQ ID NO: 682 - RNA, 19 nt, Influenza A virus
aagcuucucccuuuugcag

SEQ ID NO: 683 - RNA, 19 nt, Influenza A virus
gcaguauauacauugaagu

SEQ ID NO: 684 - RNA, 19 nt, Influenza A virus
acguguugggaacaaaugu

SEQ ID NO: 685 - RNA, 19 nt, Influenza A virus
aagcaguauauacauugaa

SEQ ID NO: 686 - RNA, 19 nt, Influenza A virus
aggauacuaacaucagaau

SEQ ID NO: 687 - RNA, 19 nt, Influenza A virus
gcauuuucagaaagaugcg

SEQ ID NO: 688 - RNA, 19 nt, Influenza A virus
acaagcaguauauacauug

SEQ ID NO: 689 - RNA, 19 nt, Influenza A virus
ucaugcagaccucagugcc

SEQ ID NO: 690 - RNA, 19 nt, Influenza A virus
caagcaguauauacauuga

SEQ ID NO: 691 - RNA, 19 nt, Influenza A virus
agacauaaacccuggucau

SEQ ID NO: 692 - RNA, 19 nt, Influenza A virus
aauaaagcuucucccuuuu

SEQ ID NO: 693 - RNA, 19 nt, Influenza A virus
uaaagcuucucccuuuugc

SEQ ID NO: 694 - RNA, 19 nt, Influenza A virus
auaauaaagcuucucccuu

SEQ ID NO: 695 - RNA, 19 nt, Influenza A virus
uaauaaagcuucucccuuu

SEQ ID NO: 696 - RNA, 19 nt, Influenza A virus
cacaaauuggcgggacaag

SEQ ID NO: 697 - RNA, 19 nt, Influenza A virus
gauaauaaagcuucucccu

SEQ ID NO: 698 - RNA, 19 nt, Influenza A virus
aaagcuucucccuuuugca

SEQ ID NO: 699 - RNA, 19 nt, Influenza A virus
auaaagcuucucccuuuug

SEQ ID NO: 700 - RNA, 19 nt, Influenza A virus
gaaccauuucaaucuuuag

SEQ ID NO: 701 - RNA, 19 nt, Influenza A virus
aguagacauaaacccuggu

SEQ ID NO: 702 - RNA, 19 nt, Influenza A virus
cucauccuucagcuuuggu

SEQ ID NO: 703 - RNA, 19 nt, Influenza A virus
ucauccuucagcuuuggug

SEQ ID NO: 704 - RNA, 19 nt, Influenza A virus
ugaaccauuucaaucuuua

SEQ ID NO: 705 - RNA, 19 nt, Influenza A virus
aaccauuucaaucuuuagu

SEQ ID NO: 706 - RNA, 19 nt, Influenza A virus
uuugaaccauuucaaucuu

SEQ ID NO: 707 - RNA, 19 nt, Influenza A virus
uugaaccauuucaaucuuu

SEQ ID NO: 708 - RNA, 19 nt, Influenza A virus
uucucccuuuugcagccgc

SEQ ID NO: 709 - RNA, 19 nt, Influenza A virus
cauccuucagcuuuggugg

SEQ ID NO: 710 - RNA, 19 nt, Influenza A virus
cuucucccuuuugcagccg

SEQ ID NO: 711 - RNA, 19 nt, Influenza A virus
guauauacauugaaguuuu

SEQ ID NO: 712 - RNA, 19 nt, Influenza A virus
ggaacaagcaguauauaca

SEQ ID NO: 713 - RNA, 19 nt, Influenza A virus
gaauuugaaccauuucaau

SEQ ID NO: 714 - RNA, 19 nt, Influenza A virus
ucucccuuuugcagccgcu

SEQ ID NO: 715 - RNA, 19 nt, Influenza A virus
cucccuuuugcagccgcuc

SEQ ID NO: 716 - RNA, 19 nt, Influenza A virus
ucccuuuugcagccgcucc

SEQ ID NO: 717 - RNA, 19 nt, Influenza A virus
ggaauuugaaccauuucaa

SEQ ID NO: 718 - RNA, 19 nt, Influenza A virus
aguauauacauugaaguuu

SEQ ID NO: 719 - RNA, 19 nt, Influenza A virus
auuugaaccauuucaaucu

SEQ ID NO: 720 - RNA, 19 nt, Influenza A virus
aauuugaaccauuucaauc

SEQ ID NO: 721 - RNA, 19 nt, Influenza A virus
gaacaagcaguauauacau

SEQ ID NO: 722 - RNA, 19 nt, Influenza A virus
gcuucucccuuuugcagcc

SEQ ID NO: 723 - RNA, 19 nt, Influenza A virus
aacaagcaguauauacauu

SEQ ID NO: 724 - RNA, 19 nt, Influenza A virus
ccuuuugcagccgcuccac

SEQ ID NO: 725 - RNA, 19 nt, Influenza A virus
acaaacucuauggaguaaa

SEQ ID NO: 726 - RNA, 19 nt, Influenza A virus
ggacaaacucuauggagua

SEQ ID NO: 727 - RNA, 19 nt, Influenza A virus
gacaaacucuauggaguaa

SEQ ID NO: 728 - RNA, 19 nt, Influenza A virus
caggauacuaacaucagaa

SEQ ID NO: 729 - RNA, 19 nt, Influenza A virus
aggacaaacucuauggagu

SEQ ID NO: 730 - RNA, 19 nt, Influenza A virus
aacguguugggaacaaaug

SEQ ID NO: 731 - RNA, 19 nt, Influenza A virus
gccaggauacuaacaucag

SEQ ID NO: 732 - RNA, 19 nt, Influenza A virus
aggaacguguugggaacaa

SEQ ID NO: 733 - RNA, 19 nt, Influenza A virus
gaacguguugggaacaaau

SEQ ID NO: 734 - RNA, 19 nt, Influenza A virus
ccaggauacuaacaucaga

SEQ ID NO: 735 - RNA, 19 nt, Influenza A virus
cuuuugcagccgcuccacc

SEQ ID NO: 736 - RNA, 19 nt, Influenza A virus
caguauauacauugaaguu

SEQ ID NO: 737 - RNA, 19 nt, Influenza A virus
ggaacguguugggaacaaa

SEQ ID NO: 738 - RNA, 19 nt, Influenza A virus
uuuugcagccgcuccacca

SEQ ID NO: 739 - RNA, 19 nt, Influenza A virus
agaugcgaaagugcuuuuu

SEQ ID NO: 740 - RNA, 19 nt, Influenza A virus
ggccauuagaggccaauac

SEQ ID NO: 741 - RNA, 19 nt, Influenza A virus
aggccauuagaggccaaua

SEQ ID NO: 742 - RNA, 19 nt, Influenza A virus
cccuuuugcagccgcucca

SEQ ID NO: 743 - RNA, 19 nt, Influenza A virus
uuagaggccaauacagugg

SEQ ID NO: 744 - RNA, 19 nt, Influenza A virus
aaggccauuagaggccaau

SEQ ID NO: 745 - RNA, 19 nt, Influenza A virus
ccauuagaggccaauacag

SEQ ID NO: 746 - RNA, 19 nt, Influenza A virus
auuagaggccaauacagug

SEQ ID NO: 747 - RNA, 19 nt, Influenza A virus
gccauuagaggccaauaca

SEQ ID NO: 748 - RNA, 19 nt, Influenza A virus
ucagcagauccacuagcau

SEQ ID NO: 749 - RNA, 19 nt, Influenza A virus
guaucagcagauccacuag

SEQ ID NO: 750 - RNA, 19 nt, Influenza A virus
caaaauucaauggucucag

SEQ ID NO: 751 - RNA, 19 nt, Influenza A virus
uaucagcagauccacuagc

SEQ ID NO: 752 - RNA, 19 nt, Influenza A virus
cagcagauccacuagcauc

SEQ ID NO: 753 - RNA, 19 nt, Influenza A virus
cauuagaggccaauacagu

SEQ ID NO: 754 - RNA, 19 nt, Influenza A virus
gucaaaauucaauggucuc

SEQ ID NO: 755 - RNA, 19 nt, Influenza A virus
ucaaaauucaauggucuca

SEQ ID NO: 756 - RNA, 19 nt, Influenza A virus
ggaucaucagaaauuggga

SEQ ID NO: 757 - RNA, 19 nt, Influenza A virus
uggaucaucagaaauuggg

SEQ ID NO: 758 - RNA, 19 nt, Influenza A virus
gaucaucagaaauugggaa

SEQ ID NO: 759 - RNA, 19 nt, Influenza A virus
agcagauccacuagcaucu

SEQ ID NO: 760 - RNA, 19 nt, Influenza A virus
uugaagacccagaugaaag

SEQ ID NO: 761 - RNA, 19 nt, Influenza A virus
acucuauggaguaaaauga

SEQ ID NO: 762 - RNA, 19 nt, Influenza A virus
aggaagacagaagauacgg

SEQ ID NO: 763 - RNA, 19 nt, Influenza A virus
aucagcagauccacuagca

SEQ ID NO: 764 - RNA, 19 nt, Influenza A virus
ugucaaaauucaauggucu

SEQ ID NO: 765 - RNA, 19 nt, Influenza A virus
aaggaagacagaagauacg

SEQ ID NO: 766 - RNA, 19 nt, Influenza A virus
caauggaucaucagaaauu

SEQ ID NO: 767 - RNA, 19 nt, Influenza A virus
cccuggucaugcagaccuc

SEQ ID NO: 768 - RNA, 19 nt, Influenza A virus
aauggaucaucagaaauug

SEQ ID NO: 769 - RNA, 19 nt, Influenza A virus
auggaucaucagaaauugg

SEQ ID NO: 770 - RNA, 19 nt, Influenza A virus
aaagcagaaugcaguucuc

SEQ ID NO: 771 - RNA, 19 nt, Influenza A virus
uuugucagaacucuauucc

SEQ ID NO: 772 - RNA, 19 nt, Influenza A virus
uugucagaacucuauucca

SEQ ID NO: 773 - RNA, 19 nt, Influenza A virus
caaagcagaaugcaguucu

SEQ ID NO: 774 - RNA, 19 nt, Influenza A virus
ucaauggaucaucagaaau

SEQ ID NO: 775 - RNA, 19 nt, Influenza A virus
cuccaccaaagcaaagcag

SEQ ID NO: 776 - RNA, 19 nt, Influenza A virus
gcuccaccaaagcaaagca

SEQ ID NO: 777 - RNA, 19 nt, Influenza A virus
uaagcaucaaugaacugag

SEQ ID NO: 778 - RNA, 19 nt, Influenza A virus
ucuauggaguaaaaugagu

SEQ ID NO: 779 - RNA, 19 nt, Influenza A virus
ucagaacucuauuccaaca

SEQ ID NO: 780 - RNA, 19 nt, Influenza A virus
gagccaggauacuaacauc

SEQ ID NO: 781 - RNA, 19 nt, Influenza A virus
gcagaaugcaguucucuuc

SEQ ID NO: 782 - RNA, 19 nt, Influenza A virus
gagaggguggugguuagca

SEQ ID NO: 783 - RNA, 19 nt, Influenza A virus
ggagccaggauacuaacau

SEQ ID NO: 784 - RNA, 19 nt, Influenza A virus
cugucaaaauucaaugguc

SEQ ID NO: 785 - RNA, 19 nt, Influenza A virus
cauuaagcaucaaugaacu

SEQ ID NO: 786 - RNA, 19 nt, Influenza A virus
agcagaaugcaguucucuu

SEQ ID NO: 787 - RNA, 19 nt, Influenza A virus
agaggguggugguuagcau

SEQ ID NO: 788 - RNA, 19 nt, Influenza A virus
aagcagaaugcaguucucu

SEQ ID NO: 789 - RNA, 19 nt, Influenza A virus
cucuauggaguaaaaugag

SEQ ID NO: 790 - RNA, 19 nt, Influenza A virus
cgcuccaccaaagcaaagc

SEQ ID NO: 791 - RNA, 19 nt, Influenza A virus
gucagaacucuauuccaac

SEQ ID NO: 792 - RNA, 19 nt, Influenza A virus
gcauuaagcaucaaugaac

SEQ ID NO: 793 - RNA, 19 nt, Influenza A virus
agcacauccggaguggagu

SEQ ID NO: 794 - RNA, 19 nt, Influenza A virus
cagagaggguggugguuag

SEQ ID NO: 795 - RNA, 19 nt, Influenza A virus
ugggagccaggauacuaac

SEQ ID NO: 796 - RNA, 19 nt, Influenza A virus
acagagaggguggugguua

SEQ ID NO: 797 - RNA, 19 nt, Influenza A virus
agagaggguggugguuagc

SEQ ID NO: 798 - RNA, 19 nt, Influenza A virus
gugggagccaggauacuaa

SEQ ID NO: 799 - RNA, 19 nt, Influenza A virus
ugucagaacucuauuccaa

SEQ ID NO: 800 - RNA, 19 nt, Influenza A virus
gaagaacuccgagauugca

SEQ ID NO: 801 - RNA, 19 nt, Influenza A virus
gggagccaggauacuaaca

SEQ ID NO: 802 - RNA, 19 nt, Influenza A virus
aacuccgagauugcaaaau

SEQ ID NO: 803 - RNA, 19 nt, Influenza A virus
aagaacuccgagauugcaa

SEQ ID NO: 804 - RNA, 19 nt, Influenza A virus
gagauugcaaaauuucucc

SEQ ID NO: 805 - RNA, 19 nt, Influenza A virus
ggguggugguuagcauuga

SEQ ID NO: 806 - RNA, 19 nt, Influenza A virus
aguaucagcagauccacua

SEQ ID NO: 807 - RNA, 19 nt, Influenza A virus
caguaucagcagauccacu

SEQ ID NO: 808 - RNA, 19 nt, Influenza A virus
auuaagcaucaaugaacug

SEQ ID NO: 809 - RNA, 19 nt, Influenza A virus
aggguggugguuagcauug

SEQ ID NO: 810 - RNA, 19 nt, Influenza A virus
agaacuccgagauugcaaa

SEQ ID NO: 811 - RNA, 19 nt, Influenza A virus
gaacuccgagauugcaaaa

SEQ ID NO: 812 - RNA, 19 nt, Influenza A virus
gacagaagauacggaccag

SEQ ID NO: 813 - RNA, 19 nt, Influenza A virus
acagaagauacggaccagc

SEQ ID NO: 814 - RNA, 19 nt, Influenza A virus
cagaacucuauuccaacaa

SEQ ID NO: 815 - RNA, 19 nt, Influenza A virus
cagaaugcaguucucuuca

SEQ ID NO: 816 - RNA, 19 nt, Influenza A virus
gcaguaucagcagauccac

SEQ ID NO: 817 - RNA, 19 nt, Influenza A virus
gguggugguuagcauugau

SEQ ID NO: 818 - RNA, 19 nt, Influenza A virus
cuccgagauugcaaaauuu

SEQ ID NO: 819 - RNA, 19 nt, Influenza A virus
uccgagauugcaaaauuuc

SEQ ID NO: 820 - RNA, 19 nt, Influenza A virus
cagaagauacggaccagca

SEQ ID NO: 821 - RNA, 19 nt, Influenza A virus
gaagacagaagauacggac

SEQ ID NO: 822 - RNA, 19 nt, Influenza A virus
agccaggauacuaacauca

SEQ ID NO: 823 - RNA, 19 nt, Influenza A virus
acuccgagauugcaaaauu

SEQ ID NO: 824 - RNA, 19 nt, Influenza A virus
gaggguggugguuagcauu

SEQ ID NO: 825 - RNA, 19 nt, Influenza A virus
aagacagaagauacggacc

SEQ ID NO: 826 - RNA, 19 nt, Influenza A virus
ggaagacagaagauacgga

SEQ ID NO: 827 - RNA, 19 nt, Influenza A virus
accaacgugggaauguauu

SEQ ID NO: 828 - RNA, 19 nt, Influenza A virus
agacagaagauacggacca

SEQ ID NO: 829 - RNA, 19 nt, Influenza A virus
cgagauugcaaaauuucuc

SEQ ID NO: 830 - RNA, 19 nt, Influenza A virus
ccgagauugcaaaauuucu

SEQ ID NO: 831 - RNA, 19 nt, Influenza A virus
uuaagcaucaaugaacuga

SEQ ID NO: 832 - RNA, 19 nt, Influenza A virus
gaccaacgugggaauguau

SEQ ID NO: 833 - RNA, 19 nt, Influenza A virus
uaaaugugaggggaucagg

SEQ ID NO: 834 - RNA, 19 nt, Influenza A virus
ugacuguaaaugugagggg

SEQ ID NO: 835 - RNA, 19 nt, Influenza A virus
ugguggggaaaagagcaac

SEQ ID NO: 836 - RNA, 19 nt, Influenza A virus
guugcuggcggaacaagca

SEQ ID NO: 837 - RNA, 19 nt, Influenza A virus
uugcuggcggaacaagcag

SEQ ID NO: 838 - RNA, 19 nt, Influenza A virus
ccaguugcuggcggaacaa

SEQ ID NO: 839 - RNA, 19 nt, Influenza A virus
cacaagauguaauuaugga

SEQ ID NO: 840 - RNA, 19 nt, Influenza A virus
acaagauguaauuauggaa

SEQ ID NO: 841 - RNA, 19 nt, Influenza A virus
aggcacaagauguaauuau

SEQ ID NO: 842 - RNA, 19 nt, Influenza A virus
gcacaagauguaauuaugg

SEQ ID NO: 843 - RNA, 19 nt, Influenza A virus
aagauguaauuauggaagu

SEQ ID NO: 844 - RNA, 19 nt, Influenza A virus
agauguaauuauggaaguu

SEQ ID NO: 845 - RNA, 19 nt, Influenza A virus
guaaaugugaggggaucag

SEQ ID NO: 846 - RNA, 19 nt, Influenza A virus
ggcacaagauguaauuaug

SEQ ID NO: 847 - RNA, 19 nt, Influenza A virus
aaccuugcaaaaggggaaa

SEQ ID NO: 848 - RNA, 19 nt, Influenza A virus
accuugcaaaaggggaaaa

SEQ ID NO: 849 - RNA, 19 nt, Influenza A virus
caguugcuggcggaacaag

SEQ ID NO: 850 - RNA, 19 nt, Influenza A virus
gaggcacaagauguaauua

SEQ ID NO: 851 - RNA, 19 nt, Influenza A virus
cagaugaaagcacauccgg

SEQ ID NO: 852 - RNA, 19 nt, Influenza A virus
uuucucccaguugcuggcg

SEQ ID NO: 853 - RNA, 19 nt, Influenza A virus
cucccaguugcuggcggaa

SEQ ID NO: 854 - RNA, 19 nt, Influenza A virus
ggcggaacaagcaguauau

SEQ ID NO: 855 - RNA, 19 nt, Influenza A virus
augguggggaaaagagcaa

SEQ ID NO: 856 - RNA, 19 nt, Influenza A virus
uucucccaguugcuggcgg

SEQ ID NO: 857 - RNA, 19 nt, Influenza A virus
uacaagacuuauuuugaca

SEQ ID NO: 858 - RNA, 19 nt, Influenza A virus
aaaugugaggggaucaggg

SEQ ID NO: 859 - RNA, 19 nt, Influenza A virus
acaagacuuauuuugacaa

SEQ ID NO: 860 - RNA, 19 nt, Influenza A virus
caagacuuauuuugacaaa

SEQ ID NO: 861 - RNA, 19 nt, Influenza A virus
ucccaguugcuggcggaac

SEQ ID NO: 862 - RNA, 19 nt, Influenza A virus
gcggaacaagcaguauaua

SEQ ID NO: 863 - RNA, 19 nt, Influenza A virus
auuucucccaguugcuggc

SEQ ID NO: 864 - RNA, 19 nt, Influenza A virus
caagauguaauuauggaag

SEQ ID NO: 865 - RNA, 19 nt, Influenza A virus
auaugacuccaagcacaga

SEQ ID NO: 866 - RNA, 19 nt, Influenza A virus
cggaacaagcaguauauac

SEQ ID NO: 867 - RNA, 19 nt, Influenza A virus
gauaugacuccaagcacag

SEQ ID NO: 868 - RNA, 19 nt, Influenza A virus
aguugcuggcggaacaagc

SEQ ID NO: 869 - RNA, 19 nt, Influenza A virus
uugagaaucagcucauccu

SEQ ID NO: 870 - RNA, 19 nt, Influenza A virus
aaaagagcaacagcuauac

SEQ ID NO: 871 - RNA, 19 nt, Influenza A virus
aaagagcaacagcuauacu

SEQ ID NO: 872 - RNA, 19 nt, Influenza A virus
ccagaugaaagcacauccg

SEQ ID NO: 873 - RNA, 19 nt, Influenza A virus
cccaguugcuggcggaaca

SEQ ID NO: 874 - RNA, 19 nt, Influenza A virus
gacuguaaaugugagggga

SEQ ID NO: 875 - RNA, 19 nt, Influenza A virus
cuggcggaacaagcaguau

SEQ ID NO: 876 - RNA, 19 nt, Influenza A virus
acuguaaaugugaggggau

SEQ ID NO: 877 - RNA, 19 nt, Influenza A virus
uggcggaacaagcaguaua

SEQ ID NO: 878 - RNA, 19 nt, Influenza A virus
uguaaaugugaggggauca

SEQ ID NO: 879 - RNA, 19 nt, Influenza A virus
cuguaaaugugaggggauc

SEQ ID NO: 880 - RNA, 19 nt, Influenza A virus
gaaagcacauccggagugg

SEQ ID NO: 881 - RNA, 19 nt, Influenza A virus
aaagcacauccggagugga

SEQ ID NO: 882 - RNA, 19 nt, Influenza A virus
ugcuggcggaacaagcagu

SEQ ID NO: 883 - RNA, 19 nt, Influenza A virus
gaagugggagccaggauac

SEQ ID NO: 884 - RNA, 19 nt, Influenza A virus
aagugggagccaggauacu

SEQ ID NO: 885 - RNA, 19 nt, Influenza A virus
ccaacgugggaauguauua

SEQ ID NO: 886 - RNA, 19 nt, Influenza A virus
gcuggcggaacaagcagua

SEQ ID NO: 887 - RNA, 19 nt, Influenza A virus
agugggagccaggauacua

SEQ ID NO: 888 - RNA, 19 nt, Influenza A virus
aagacuuauuuugacaaag

SEQ ID NO: 889 - RNA, 19 nt, Influenza A virus
ugaaagcacauccggagug

SEQ ID NO: 890 - RNA, 19 nt, Influenza A virus
uggccaugguguuuucaca

SEQ ID NO: 891 - RNA, 19 nt, Influenza A virus
guggccaugguguuuucac

SEQ ID NO: 892 - RNA, 19 nt, Influenza A virus
augaauacuccaguacaga

SEQ ID NO: 893 - RNA, 19 nt, Influenza A virus
augaagugggagccaggau

SEQ ID NO: 894 - RNA, 19 nt, Influenza A virus
aaugaagugggagccagga

SEQ ID NO: 895 - RNA, 19 nt, Influenza A virus
cccaaugaagugggagcca

SEQ ID NO: 896 - RNA, 19 nt, Influenza A virus
ugaagugggagccaggaua

SEQ ID NO: 897 - RNA, 19 nt, Influenza A virus
ggaacauaguaagaagagc

SEQ ID NO: 898 - RNA, 19 nt, Influenza A virus
aggaacauaguaagaagag

SEQ ID NO: 899 - RNA, 19 nt, Influenza A virus
aagcacauccggaguggag

SEQ ID NO: 900 - RNA, 19 nt, Influenza A virus
cccagaugaaagcacaucc

SEQ ID NO: 901 - RNA, 19 nt, Influenza A virus
augaaagcacauccggagu

SEQ ID NO: 902 - RNA, 19 nt, Influenza A virus
ucucccaguugcuggcgga

SEQ ID NO: 903 - RNA, 19 nt, Influenza A virus
gaugaauacuccaguacag

SEQ ID NO: 904 - RNA, 19 nt, Influenza A virus
agacuuauuuugacaaagu

SEQ ID NO: 905 - RNA, 19 nt, Influenza A virus
ccaaugaagugggagccag

SEQ ID NO: 906 - RNA, 19 nt, Influenza A virus
auggccaucaauuaauguu

SEQ ID NO: 907 - RNA, 19 nt, Influenza A virus
uggggaaaagagcaacagc

SEQ ID NO: 908 - RNA, 19 nt, Influenza A virus
gaauacuccaguacagaga

SEQ ID NO: 909 - RNA, 19 nt, Influenza A virus
gaugaaagcacauccggag

SEQ ID NO: 910 - RNA, 19 nt, Influenza A virus
guggggaaaagagcaacag

SEQ ID NO: 911 - RNA, 19 nt, Influenza A virus
aaauuggcgggacaaggau

SEQ ID NO: 912 - RNA, 19 nt, Influenza A virus
ggccaugguguuuucacaa

SEQ ID NO: 913 - RNA, 19 nt, Influenza A virus
ugaauacuccaguacagag

SEQ ID NO: 914 - RNA, 19 nt, Influenza A virus
caaauuggcgggacaagga

SEQ ID NO: 915 - RNA, 19 nt, Influenza A virus
aauacaguggguuugucag

SEQ ID NO: 916 - RNA, 19 nt, Influenza A virus
caauacaguggguuuguca

SEQ ID NO: 917 - RNA, 19 nt, Influenza A virus
aauuggcgggacaaggaug

SEQ ID NO: 918 - RNA, 19 nt, Influenza A virus
uagguaaggaagacagaag

SEQ ID NO: 919 - RNA, 19 nt, Influenza A virus
caaugaagugggagccagg

SEQ ID NO: 920 - RNA, 19 nt, Influenza A virus
agaugaaagcacauccgga

SEQ ID NO: 921 - RNA, 19 nt, Influenza A virus
ccaauacaguggguuuguc

SEQ ID NO: 922 - RNA, 19 nt, Influenza A virus
gguaaggaagacagaagau

SEQ ID NO: 923 - RNA, 19 nt, Influenza A virus
guaaggaagacagaagaua

SEQ ID NO: 924 - RNA, 19 nt, Influenza A virus
gguggggaaaagagcaaca

SEQ ID NO: 925 - RNA, 19 nt, Influenza A virus
guauggaaagaauaaaaga

SEQ ID NO: 926 - RNA, 19 nt, Influenza A virus
aauacuccaguacagagag

SEQ ID NO: 927 - RNA, 19 nt, Influenza A virus
acaaauuggcgggacaagg

SEQ ID NO: 928 - RNA, 19 nt, Influenza A virus
ggaaaagagcaacagcuau

SEQ ID NO: 929 - RNA, 19 nt, Influenza A virus
guggaugaauacuccagua

SEQ ID NO: 930 - RNA, 19 nt, Influenza A virus
uggaugaauacuccaguac

SEQ ID NO: 931 - RNA, 19 nt, Influenza A virus
gaaaagagcaacagcuaua

SEQ ID NO: 932 - RNA, 19 nt, Influenza A virus
ggaugaauacuccaguaca

SEQ ID NO: 933 - RNA, 19 nt, Influenza A virus
agguaaggaagacagaaga

SEQ ID NO: 934 - RNA, 19 nt, Influenza A virus
ggcaaggagacgugguguu

SEQ ID NO: 935 - RNA, 19 nt, Influenza A virus
gggaaaagagcaacagcua

SEQ ID NO: 936 - RNA, 19 nt, Influenza A virus
uaaggaagacagaagauac

SEQ ID NO: 937 - RNA, 19 nt, Influenza A virus
gaccagcauuaagcaucaa

SEQ ID NO: 938 - RNA, 19 nt, Influenza A virus
uauuccaacaaaugagaga

SEQ ID NO: 939 - RNA, 19 nt, Influenza A virus
ggaccagcauuaagcauca

SEQ ID NO: 940 - RNA, 19 nt, Influenza A virus
uaugacuccaagcacagag

SEQ ID NO: 941 - RNA, 19 nt, Influenza A virus
gguguggaugaauacucca

SEQ ID NO: 942 - RNA, 19 nt, Influenza A virus
uggaaguuguuuuucccaa

SEQ ID NO: 943 - RNA, 19 nt, Influenza A virus
gugacaugguggaauagaa

SEQ ID NO: 944 - RNA, 19 nt, Influenza A virus
auggaaguuguuuuuccca

SEQ ID NO: 945 - RNA, 19 nt, Influenza A virus
accagcauuaagcaucaau

SEQ ID NO: 946 - RNA, 19 nt, Influenza A virus
ugacaugguggaauagaaa

SEQ ID NO: 947 - RNA, 19 nt, Influenza A virus
aacaagauuucucccaguu

SEQ ID NO: 948 - RNA, 19 nt, Influenza A virus
ggggaaaagagcaacagcu

SEQ ID NO: 949 - RNA, 19 nt, Influenza A virus
gaaguuguuuuucccaaug

SEQ ID NO: 950 - RNA, 19 nt, Influenza A virus
ggaaguuguuuuucccaau

SEQ ID NO: 951 - RNA, 19 nt, Influenza A virus
aaguuguuuuucccaauga

SEQ ID NO: 952 - RNA, 19 nt, Influenza A virus
ggguguggaugaauacucc

SEQ ID NO: 953 - RNA, 19 nt, Influenza A virus
caauagccgaagcaauaau

SEQ ID NO: 954 - RNA, 19 nt, Influenza A virus
ucaauagccgaagcaauaa

SEQ ID NO: 955 - RNA, 19 nt, Influenza A virus
aaaacaagauuucucccag

SEQ ID NO: 956 - RNA, 19 nt, Influenza A virus
gaaaaacaagauuucuccc

SEQ ID NO: 957 - RNA, 19 nt, Influenza A virus
aaacaagauuucucccagu

SEQ ID NO: 958 - RNA, 19 nt, Influenza A virus
guguggaugaauacuccag

SEQ ID NO: 959 - RNA, 19 nt, Influenza A virus
acaagauuucucccaguug

SEQ ID NO: 960 - RNA, 19 nt, Influenza A virus
caagauuucucccaguugc

SEQ ID NO: 961 - RNA, 19 nt, Influenza A virus
uggguguggaugaauacuc

SEQ ID NO: 962 - RNA, 19 nt, Influenza A virus
uucauuuuagaaaucaagu

SEQ ID NO: 963 - RNA, 19 nt, Influenza A virus
cagucaauagccgaagcaa

SEQ ID NO: 964 - RNA, 19 nt, Influenza A virus
auacaguggguuugucaga

SEQ ID NO: 965 - RNA, 19 nt, Influenza A virus
acaguggguuugucagaac

SEQ ID NO: 966 - RNA, 19 nt, Influenza A virus
gucaauagccgaagcaaua

SEQ ID NO: 967 - RNA, 19 nt, Influenza A virus
uacaguggguuugucagaa

SEQ ID NO: 968 - RNA, 19 nt, Influenza A virus
aagauuucucccaguugcu

SEQ ID NO: 969 - RNA, 19 nt, Influenza A virus
guucauuuuagaaaucaag

SEQ ID NO: 970 - RNA, 19 nt, Influenza A virus
gggcaaggagacguggugu

SEQ ID NO: 971 - RNA, 19 nt, Influenza A virus
auggguguggaugaauacu

SEQ ID NO: 972 - RNA, 19 nt, Influenza A virus
ucauuuuagaaaucaaguc

SEQ ID NO: 973 - RNA, 19 nt, Influenza A virus
uucagcucauagugagugg

SEQ ID NO: 974 - RNA, 19 nt, Influenza A virus
ccagauaugacuccaagca

SEQ ID NO: 975 - RNA, 19 nt, Influenza A virus
caaagcaaagcagaaugca

SEQ ID NO: 976 - RNA, 19 nt, Influenza A virus
agucaauagccgaagcaau

SEQ ID NO: 977 - RNA, 19 nt, Influenza A virus
ccaaagcaaagcagaaugc

SEQ ID NO: 978 - RNA, 19 nt, Influenza A virus
uacaacaagaccacuaaaa

SEQ ID NO: 979 - RNA, 19 nt, Influenza A virus
agaaaucaagucaagauac

SEQ ID NO: 980 - RNA, 19 nt, Influenza A virus
agcaaagcagaaugcaguu

SEQ ID NO: 981 - RNA, 19 nt, Influenza A virus
cagauaugacuccaagcac

SEQ ID NO: 982 - RNA, 19 nt, Influenza A virus
guaaaaugagugaugcugg

SEQ ID NO: 983 - RNA, 19 nt, Influenza A virus
gaaaucaagucaagauacg

SEQ ID NO: 984 - RNA, 19 nt, Influenza A virus
uuauggaaguuguuuuucc

SEQ ID NO: 985 - RNA, 19 nt, Influenza A virus
caacaagaccacuaaaaga

SEQ ID NO: 986 - RNA, 19 nt, Influenza A virus
aaagcaaagcagaaugcag

SEQ ID NO: 987 - RNA, 19 nt, Influenza A virus
uaccagauaugacuccaag

SEQ ID NO: 988 - RNA, 19 nt, Influenza A virus
agauaugacuccaagcaca

SEQ ID NO: 989 - RNA, 19 nt, Influenza A virus
auuauggaaguuguuuuuc

SEQ ID NO: 990 - RNA, 19 nt, Influenza A virus
acaacaagaccacuaaaag

SEQ ID NO: 991 - RNA, 19 nt, Influenza A virus
aagcaaagcagaaugcagu

SEQ ID NO: 992 - RNA, 19 nt, Influenza A virus
gaguaaaaugagugaugcu

SEQ ID NO: 993 - RNA, 19 nt, Influenza A virus
aguaaaaugagugaugcug

SEQ ID NO: 994 - RNA, 19 nt, Influenza A virus
accagauaugacuccaagc

SEQ ID NO: 995 - RNA, 19 nt, Influenza A virus
uguggaugaauacuccagu

SEQ ID NO: 996 - RNA, 19 nt, Influenza A virus
aaaaacaagauuucuccca

SEQ ID NO: 997 - RNA, 19 nt, Influenza A virus
gcaaagcagaaugcaguuc

SEQ ID NO: 998 - RNA, 19 nt, Influenza A virus
gauugguucagcucauagu

SEQ ID NO: 999 - RNA, 19 nt, Influenza A virus
uuuuagaaaucaagucaag

SEQ ID NO: 1000 - RNA, 19 nt, Influenza A virus
uauggaaguuguuuuuccc

SEQ ID NO: 1001 - RNA, 19 nt, Influenza A virus
agauugguucagcucauag

SEQ ID NO: 1002 - RNA, 19 nt, Influenza A virus
aauggguguggaugaauac

SEQ ID NO: 1003 - RNA, 19 nt, Influenza A virus
uuuagaaaucaagucaaga

SEQ ID NO: 1004 - RNA, 19 nt, Influenza A virus
cuacaacaagaccacuaaa

SEQ ID NO: 1005 - RNA, 19 nt, Influenza A virus
uagaaaucaagucaagaua

SEQ ID NO: 1006 - RNA, 19 nt, Influenza A virus
uuagaaaucaagucaagau

SEQ ID NO: 1007 - RNA, 19 nt, Influenza A virus
uuaccagauaugacuccaa

SEQ ID NO: 1008 - RNA, 19 nt, Influenza A virus
accaaagcaaagcagaaug

SEQ ID NO: 1009 - RNA, 19 nt, Influenza A virus
acaaugguggggaaaagag

SEQ ID NO: 1010 - RNA, 19 nt, Influenza A virus
caaugguggggaaaagagc

SEQ ID NO: 1011 - RNA, 19 nt, Influenza A virus
cccuugaugguugcauaca

SEQ ID NO: 1012 - RNA, 19 nt, Influenza A virus
caccaaagcaaagcagaau

SEQ ID NO: 1013 - RNA, 19 nt, Influenza A virus
aaugguggggaaaagagca

SEQ ID NO: 1014 - RNA, 19 nt, Influenza A virus
aaauggguguggaugaaua

SEQ ID NO: 1015 - RNA, 19 nt, Influenza A virus
caaaauggguguggaugaa

SEQ ID NO: 1016 - RNA, 19 nt, Influenza A virus
aaaauggguguggaugaau

SEQ ID NO: 1017 - RNA, 19 nt, Influenza A virus
aagaagaacuccgagauug

SEQ ID NO: 1018 - RNA, 19 nt, Influenza A virus
gcaaaauggguguggauga

SEQ ID NO: 1019 - RNA, 19 nt, Influenza A virus
ccuugaugguugcauacau

SEQ ID NO: 1020 - RNA, 19 nt, Influenza A virus
agaagaacuccgagauugc

SEQ ID NO: 1021 - RNA, 19 nt, Influenza A virus
cuugaugguugcauacaug

SEQ ID NO: 1022 - RNA, 19 nt, Influenza A virus
agcaaaauggguguggaug

SEQ ID NO: 1023 - RNA, 19 nt, Influenza A virus
ccaccaaagcaaagcagaa

SEQ ID NO: 1024 - RNA, 19 nt, Influenza A virus
aaagaagaacuccgagauu

SEQ ID NO: 1025 - RNA, 19 nt, Influenza A virus
uauuaccagauaugacucc

SEQ ID NO: 1026 - RNA, 19 nt, Influenza A virus
cagcaaaauggguguggau

SEQ ID NO: 1027 - RNA, 19 nt, Influenza A virus
ugguucagcucauagugag

SEQ ID NO: 1028 - RNA, 19 nt, Influenza A virus
guucagcucauagugagug

SEQ ID NO: 1029 - RNA, 19 nt, Influenza A virus
aagagucagcaaaaugggu

SEQ ID NO: 1030 - RNA, 19 nt, Influenza A virus
gucagcaaaaugggugugg

SEQ ID NO: 1031 - RNA, 19 nt, Influenza A virus
ucagcaaaaugggugugga

SEQ ID NO: 1032 - RNA, 19 nt, Influenza A virus
accugaauuucgucaacag

SEQ ID NO: 1033 - RNA, 19 nt, Influenza A virus
cucccuugaugguugcaua

SEQ ID NO: 1034 - RNA, 19 nt, Influenza A virus
cuauuccaacaaaugagag

SEQ ID NO: 1035 - RNA, 19 nt, Influenza A virus
ucccuugaugguugcauac

SEQ ID NO: 1036 - RNA, 19 nt, Influenza A virus
ucucccuugaugguugcau

SEQ ID NO: 1037 - RNA, 19 nt, Influenza A virus
gguucagcucauagugagu

SEQ ID NO: 1038 - RNA, 19 nt, Influenza A virus
auuaccagauaugacucca

SEQ ID NO: 1039 - RNA, 19 nt, Influenza A virus
cauccggaguggaguccgc

SEQ ID NO: 1040 - RNA, 19 nt, Influenza A virus
gaccugaauuucgucaaca

SEQ ID NO: 1041 - RNA, 19 nt, Influenza A virus
uugguucagcucauaguga

SEQ ID NO: 1042 - RNA, 19 nt, Influenza A virus
ccaaaaguauacaagacuu

SEQ ID NO: 1043 - RNA, 19 nt, Influenza A virus
acugaagaacaagcugugg

SEQ ID NO: 1044 - RNA, 19 nt, Influenza A virus
cugaagaacaagcugugga

SEQ ID NO: 1045 - RNA, 19 nt, Influenza A virus
caaaaguauacaagacuua

SEQ ID NO: 1046 - RNA, 19 nt, Influenza A virus
auugggaagcugucaaaau

SEQ ID NO: 1047 - RNA, 19 nt, Influenza A virus
aaagaugccggcacuuuaa

SEQ ID NO: 1048 - RNA, 19 nt, Influenza A virus
auugguucagcucauagug

SEQ ID NO: 1049 - RNA, 19 nt, Influenza A virus
ugaagaacaagcuguggau

SEQ ID NO: 1050 - RNA, 19 nt, Influenza A virus
aauugggaagcugucaaaa

SEQ ID NO: 1051 - RNA, 19 nt, Influenza A virus
agucagcaaaaugggugug

SEQ ID NO: 1052 - RNA, 19 nt, Influenza A virus
acauccggaguggaguccg

SEQ ID NO: 1053 - RNA, 19 nt, Influenza A virus
ugcaaaauuucucccuuga

SEQ ID NO: 1054 - RNA, 19 nt, Influenza A virus
aaaauuucucccuugaugg

SEQ ID NO: 1055 - RNA, 19 nt, Influenza A virus
uuuuggucaauaccuauca

SEQ ID NO: 1056 - RNA, 19 nt, Influenza A virus
gcaaaauuucucccuugau

SEQ ID NO: 1057 - RNA, 19 nt, Influenza A virus
caaaauuucucccuugaug

SEQ ID NO: 1058 - RNA, 19 nt, Influenza A virus
cacaaugguggggaaaaga

SEQ ID NO: 1059 - RNA, 19 nt, Influenza A virus
aaauuucucccuugauggu

SEQ ID NO: 1060 - RNA, 19 nt, Influenza A virus
gaguucgagaccaacgugg

SEQ ID NO: 1061 - RNA, 19 nt, Influenza A virus
auuucucccuugaugguug

SEQ ID NO: 1062 - RNA, 19 nt, Influenza A virus
uguugguaaugaaacgaaa

SEQ ID NO: 1063 - RNA, 19 nt, Influenza A virus
uauacaagacuuauuuuga

SEQ ID NO: 1064 - RNA, 19 nt, Influenza A virus
ugggaagcugucaaaauuc

SEQ ID NO: 1065 - RNA, 19 nt, Influenza A virus
gagaguucgagaccaacgu

SEQ ID NO: 1066 - RNA, 19 nt, Influenza A virus
aaauugggaagcugucaaa

SEQ ID NO: 1067 - RNA, 19 nt, Influenza A virus
aguauacaagacuuauuuu

SEQ ID NO: 1068 - RNA, 19 nt, Influenza A virus
guguugguaaugaaacgaa

SEQ ID NO: 1069 - RNA, 19 nt, Influenza A virus
aaguauacaagacuuauuu

SEQ ID NO: 1070 - RNA, 19 nt, Influenza A virus
aaaguauacaagacuuauu

SEQ ID NO: 1071 - RNA, 19 nt, Influenza A virus
agaguucgagaccaacgug

SEQ ID NO: 1072 - RNA, 19 nt, Influenza A virus
gaaaagaugccggcacuuu

SEQ ID NO: 1073 - RNA, 19 nt, Influenza A virus
uucucccuugaugguugca

SEQ ID NO: 1074 - RNA, 19 nt, Influenza A virus
ggaaaagaugccggcacuu

SEQ ID NO: 1075 - RNA, 19 nt, Influenza A virus
guauacaagacuuauuuug

SEQ ID NO: 1076 - RNA, 19 nt, Influenza A virus
uugggaagcugucaaaauu

SEQ ID NO: 1077 - RNA, 19 nt, Influenza A virus
gggaagcugucaaaauuca

SEQ ID NO: 1078 - RNA, 19 nt, Influenza A virus
agauugcaaaauuucuccc

SEQ ID NO: 1079 - RNA, 19 nt, Influenza A virus
guugguaaugaaacgaaaa

SEQ ID NO: 1080 - RNA, 19 nt, Influenza A virus
uuucucccuugaugguugc

SEQ ID NO: 1081 - RNA, 19 nt, Influenza A virus
aauuauggaaguuguuuuu

SEQ ID NO: 1082 - RNA, 19 nt, Influenza A virus
uguuuuucccaaugaagug

SEQ ID NO: 1083 - RNA, 19 nt, Influenza A virus
auugcaaaauuucucccuu

SEQ ID NO: 1084 - RNA, 19 nt, Influenza A virus
uuuuucccaaugaaguggg

SEQ ID NO: 1085 - RNA, 19 nt, Influenza A virus
guuuuucccaaugaagugg

SEQ ID NO: 1086 - RNA, 19 nt, Influenza A virus
aauuucucccuugaugguu

SEQ ID NO: 1087 - RNA, 19 nt, Influenza A virus
uucucggaaaagaugccgg

SEQ ID NO: 1088 - RNA, 19 nt, Influenza A virus
uuuggucaauaccuaucaa

SEQ ID NO: 1089 - RNA, 19 nt, Influenza A virus
gauugcaaaauuucucccu

SEQ ID NO: 1090 - RNA, 19 nt, Influenza A virus
aaaaguauacaagacuuau

SEQ ID NO: 1091 - RNA, 19 nt, Influenza A virus
acccaaaaguauacaagac

SEQ ID NO: 1092 - RNA, 19 nt, Influenza A virus
guuuuggucaauaccuauc

SEQ ID NO: 1093 - RNA, 19 nt, Influenza A virus
cacauccggaguggagucc

SEQ ID NO: 1094 - RNA, 19 nt, Influenza A virus
uuguuuuucccaaugaagu

SEQ ID NO: 1095 - RNA, 19 nt, Influenza A virus
gaaauugggaagcugucaa

SEQ ID NO: 1096 - RNA, 19 nt, Influenza A virus
cggaaaagaugccggcacu

SEQ ID NO: 1097 - RNA, 19 nt, Influenza A virus
uccaccaaagcaaagcaga

SEQ ID NO: 1098 - RNA, 19 nt, Influenza A virus
agaaauugggaagcuguca

SEQ ID NO: 1099 - RNA, 19 nt, Influenza A virus
aagcugucaaaauucaaug

SEQ ID NO: 1100 - RNA, 19 nt, Influenza A virus
uaugaggaguucacaaugg

SEQ ID NO: 1101 - RNA, 19 nt, Influenza A virus
ucggaaaagaugccggcac

SEQ ID NO: 1102 - RNA, 19 nt, Influenza A virus
ggaagcugucaaaauucaa

SEQ ID NO: 1103 - RNA, 19 nt, Influenza A virus
gcugucaaaauucaauggu

SEQ ID NO: 1104 - RNA, 19 nt, Influenza A virus
augaggaguucacaauggu

SEQ ID NO: 1105 - RNA, 19 nt, Influenza A virus
gaagcugucaaaauucaau

SEQ ID NO: 1106 - RNA, 19 nt, Influenza A virus
aguuguuuuucccaaugaa

SEQ ID NO: 1107 - RNA, 19 nt, Influenza A virus
guuguuuuucccaaugaag

SEQ ID NO: 1108 - RNA, 19 nt, Influenza A virus
uugcaaaauuucucccuug

SEQ ID NO: 1109 - RNA, 19 nt, Influenza A virus
agcugucaaaauucaaugg

SEQ ID NO: 1110 - RNA, 19 nt, Influenza A virus
cucggaaaagaugccggca

SEQ ID NO: 1111 - RNA, 19 nt, Influenza A virus
gaacagucaauagccgaag

SEQ ID NO: 1112 - RNA, 19 nt, Influenza A virus
uacccaaaaguauacaaga

SEQ ID NO: 1113 - RNA, 19 nt, Influenza A virus
ucaaugaugugggagauua

SEQ ID NO: 1114 - RNA, 19 nt, Influenza A virus
aaaagaugccggcacuuua

SEQ ID NO: 1115 - RNA, 19 nt, Influenza A virus
gacaugguggaauagaaau

SEQ ID NO: 1116 - RNA, 19 nt, Influenza A virus
caaugaugugggagauuaa

SEQ ID NO: 1117 - RNA, 19 nt, Influenza A virus
gaauaaaagaacuacggaa

SEQ ID NO: 1118 - RNA, 19 nt, Influenza A virus
aucagaaauugggaagcug

SEQ ID NO: 1119 - RNA, 19 nt, Influenza A virus
gugaccugaauuucgucaa

SEQ ID NO: 1120 - RNA, 19 nt, Influenza A virus
aggugaccugaauuucguc

SEQ ID NO: 1121 - RNA, 19 nt, Influenza A virus
ggugaccugaauuucguca

SEQ ID NO: 1122 - RNA, 19 nt, Influenza A virus
ucagaaauugggaagcugu

SEQ ID NO: 1123 - RNA, 19 nt, Influenza A virus
ugaccugaauuucgucaac

SEQ ID NO: 1124 - RNA, 19 nt, Influenza A virus
cccaaaaguauacaagacu

SEQ ID NO: 1125 - RNA, 19 nt, Influenza A virus
auacaagacuuauuuugac

SEQ ID NO: 1126 - RNA, 19 nt, Influenza A virus
ucucggaaaagaugccggc

SEQ ID NO: 1127 - RNA, 19 nt, Influenza A virus
ccugagucgguuuugguca

SEQ ID NO: 1128 - RNA, 19 nt, Influenza A virus
aacagucaauagccgaagc

SEQ ID NO: 1129 - RNA, 19 nt, Influenza A virus
cugagucgguuuuggucaa

SEQ ID NO: 1130 - RNA, 19 nt, Influenza A virus
agucgguuuuggucaauac

SEQ ID NO: 1131 - RNA, 19 nt, Influenza A virus
gagucgguuuuggucaaua

SEQ ID NO: 1132 - RNA, 19 nt, Influenza A virus
cagaaauugggaagcuguc

SEQ ID NO: 1133 - RNA, 19 nt, Influenza A virus
uuuucccaaugaaguggga

SEQ ID NO: 1134 - RNA, 19 nt, Influenza A virus
uucccaaugaagugggagc

SEQ ID NO: 1135 - RNA, 19 nt, Influenza A virus
uuucccaaugaagugggag

SEQ ID NO: 1136 - RNA, 19 nt, Influenza A virus
agaccaacgugggaaugua

SEQ ID NO: 1137 - RNA, 19 nt, Influenza A virus
aagaugccggcacuuuaau

SEQ ID NO: 1138 - RNA, 19 nt, Influenza A virus
ugagucgguuuuggucaau

SEQ ID NO: 1139 - RNA, 19 nt, Influenza A virus
aaaucaagucaagauacgc

SEQ ID NO: 1140 - RNA, 19 nt, Influenza A virus
cgguuuuggucaauaccua

SEQ ID NO: 1141 - RNA, 19 nt, Influenza A virus
ucgguuuuggucaauaccu

SEQ ID NO: 1142 - RNA, 19 nt, Influenza A virus
cgagaccaacgugggaaug

SEQ ID NO: 1143 - RNA, 19 nt, Influenza A virus
gagaccaacgugggaaugu

SEQ ID NO: 1144 - RNA, 19 nt, Influenza A virus
agaugccggcacuuuaauu

SEQ ID NO: 1145 - RNA, 19 nt, Influenza A virus
gaugccggcacuuuaauug

SEQ ID NO: 1146 - RNA, 19 nt, Influenza A virus
augccggcacuuuaauuga

SEQ ID NO: 1147 - RNA, 19 nt, Influenza A virus
ugccggcacuuuaauugaa

SEQ ID NO: 1148 - RNA, 19 nt, Influenza A virus
gccggcacuuuaauugaag

SEQ ID NO: 1149 - RNA, 19 nt, Influenza A virus
ugaggaguucacaauggug

SEQ ID NO: 1150 - RNA, 19 nt, Influenza A virus
ccggcacuuuaauugaaga

SEQ ID NO: 1151 - RNA, 19 nt, Influenza A virus
aguucgagaccaacguggg

SEQ ID NO: 1152 - RNA, 19 nt, Influenza A virus
aauguauuauuaucuccug

SEQ ID NO: 1153 - RNA, 19 nt, Influenza A virus
ucaucagaaauugggaagc

SEQ ID NO: 1154 - RNA, 19 nt, Influenza A virus
uucgagaccaacgugggaa

SEQ ID NO: 1155 - RNA, 19 nt, Influenza A virus
aucaucagaaauugggaag

SEQ ID NO: 1156 - RNA, 19 nt, Influenza A virus
auguauuauuaucuccuga

SEQ ID NO: 1157 - RNA, 19 nt, Influenza A virus
ucgagaccaacgugggaau

SEQ ID NO: 1158 - RNA, 19 nt, Influenza A virus
guucgagaccaacguggga

SEQ ID NO: 1159 - RNA, 19 nt, Influenza A virus
gguuuuggucaauaccuau

SEQ ID NO: 1160 - RNA, 19 nt, Influenza A virus
ggaauguauuauuaucucc

SEQ ID NO: 1161 - RNA, 19 nt, Influenza A virus
gggaauguauuauuaucuc

SEQ ID NO: 1162 - RNA, 19 nt, Influenza A virus
caucagaaauugggaagcu

SEQ ID NO: 1163 - RNA, 19 nt, Influenza A virus
ucccaaugaagugggagcc

SEQ ID NO: 1164 - RNA, 19 nt, Influenza A virus
uaaggccauuagaggccaa

SEQ ID NO: 1165 - RNA, 19 nt, Influenza A virus
gucgguuuuggucaauacc

SEQ ID NO: 1166 - RNA, 19 nt, Influenza A virus
gguccugagucgguuuugg

SEQ ID NO: 1167 - RNA, 19 nt, Influenza A virus
guccugagucgguuuuggu

SEQ ID NO: 1168 - RNA, 19 nt, Influenza A virus
cuaaggccauuagaggcca

SEQ ID NO: 1169 - RNA, 19 nt, Influenza A virus
ccuaaggccauuagaggcc

SEQ ID NO: 1170 - RNA, 19 nt, Influenza A virus
cggcacuuuaauugaagac

SEQ ID NO: 1171 - RNA, 19 nt, Influenza A virus
acagucaauagccgaagca

SEQ ID NO: 1172 - RNA, 19 nt, Influenza A virus
uucucauuauagguaagga

SEQ ID NO: 1173 - RNA, 19 nt, Influenza A virus
uccugagucgguuuugguc

SEQ ID NO: 1174 - RNA, 19 nt, Influenza A virus
cucauuauagguaaggaag

SEQ ID NO: 1175 - RNA, 19 nt, Influenza A virus
ucauuauagguaaggaaga

SEQ ID NO: 1176 - RNA, 19 nt, Influenza A virus
uuucucauuauagguaagg

SEQ ID NO: 1177 - RNA, 19 nt, Influenza A virus
gaauguauuauuaucuccu

SEQ ID NO: 1178 - RNA, 19 nt, Influenza A virus
ucucauuauagguaaggaa

SEQ ID NO: 1179 - RNA, 19 nt, Influenza A virus
gaucagaucgagugauggu

SEQ ID NO: 1180 - RNA, 19 nt, Influenza A virus
ggaucagaucgagugaugg

SEQ ID NO: 1181 - RNA, 19 nt, Influenza A virus
augggaaugguuggaguau

SEQ ID NO: 1182 - RNA, 19 nt, Influenza A virus
ugggaaugguuggaguauu

SEQ ID NO: 1183 - RNA, 19 nt, Influenza A virus
augaugaugggcauguuca

SEQ ID NO: 1184 - RNA, 19 nt, Influenza A virus
ugaugaugggcauguucaa

SEQ ID NO: 1185 - RNA, 19 nt, Influenza A virus
aucuguuccaccauugaag

SEQ ID NO: 1186 - RNA, 19 nt, Influenza A virus
ucuguuccaccauugaaga

SEQ ID NO: 1187 - RNA, 19 nt, Influenza A virus
gaucuguuccaccauugaa

SEQ ID NO: 1188 - RNA, 19 nt, Influenza A virus
gaagaucuguuccaccauu

SEQ ID NO: 1189 - RNA, 19 nt, Influenza A virus
aagaucuguuccaccauug

SEQ ID NO: 1190 - RNA, 19 nt, Influenza A virus
ugaagaucuguuccaccau

SEQ ID NO: 1191 - RNA, 19 nt, Influenza A virus
agaucuguuccaccauuga

SEQ ID NO: 1192 - RNA, 19 nt, Influenza A virus
ugauaaacaaugaccuugg

SEQ ID NO: 1193 - RNA, 19 nt, Influenza A virus
augauaaacaaugaccuug

SEQ ID NO: 1194 - RNA, 19 nt, Influenza A virus
ccauacagccauggaacag

SEQ ID NO: 1195 - RNA, 19 nt, Influenza A virus
cauacagccauggaacagg

SEQ ID NO: 1196 - RNA, 19 nt, Influenza A virus
gaggccauggugucuaggg

SEQ ID NO: 1197 - RNA, 19 nt, Influenza A virus
aggccauggugucuagggc

SEQ ID NO: 1198 - RNA, 19 nt, Influenza A virus
ggaggccauggugucuagg

SEQ ID NO: 1199 - RNA, 19 nt, Influenza A virus
uggaggccauggugucuag

SEQ ID NO: 1200 - RNA, 19 nt, Influenza A virus
gagaucaugaagaucuguu

SEQ ID NO: 1201 - RNA, 19 nt, Influenza A virus
accaagaaaauggucacac

SEQ ID NO: 1202 - RNA, 19 nt, Influenza A virus
ccaagaaaauggucacaca

SEQ ID NO: 1203 - RNA, 19 nt, Influenza A virus
ugaccaagaaaauggucac

SEQ ID NO: 1204 - RNA, 19 nt, Influenza A virus
augaccaagaaaaugguca

SEQ ID NO: 1205 - RNA, 19 nt, Influenza A virus
caugaagaucuguuccacc

SEQ ID NO: 1206 - RNA, 19 nt, Influenza A virus
augaagaucuguuccacca

SEQ ID NO: 1207 - RNA, 19 nt, Influenza A virus
caagaaaauggucacacaa

SEQ ID NO: 1208 - RNA, 19 nt, Influenza A virus
ucaugaagaucuguuccac

SEQ ID NO: 1209 - RNA, 19 nt, Influenza A virus
aucaugaagaucuguucca

SEQ ID NO: 1210 - RNA, 19 nt, Influenza A virus
gaugggcauguucaacaug

SEQ ID NO: 1211 - RNA, 19 nt, Influenza A virus
ugaugggcauguucaacau

SEQ ID NO: 1212 - RNA, 19 nt, Influenza A virus
augagggaauacaagcagg

SEQ ID NO: 1213 - RNA, 19 nt, Influenza A virus
acaugaccaagaaaauggu

SEQ ID NO: 1214 - RNA, 19 nt, Influenza A virus
caugagggaauacaagcag

SEQ ID NO: 1215 - RNA, 19 nt, Influenza A virus
gaugaugggcauguucaac

SEQ ID NO: 1216 - RNA, 19 nt, Influenza A virus
aacaugaccaagaaaaugg

SEQ ID NO: 1217 - RNA, 19 nt, Influenza A virus
augaugggcauguucaaca

SEQ ID NO: 1218 - RNA, 19 nt, Influenza A virus
caugaccaagaaaaugguc

SEQ ID NO: 1219 - RNA, 19 nt, Influenza A virus
cucauagugaaugcaccaa

SEQ ID NO: 1220 - RNA, 19 nt, Influenza A virus
gaccaagaaaauggucaca

SEQ ID NO: 1221 - RNA, 19 nt, Influenza A virus
ucauagugaaugcaccaaa

SEQ ID NO: 1222 - RNA, 19 nt, Influenza A virus
augggcauguucaacaugc

SEQ ID NO: 1223 - RNA, 19 nt, Influenza A virus
acaacaugaccaagaaaau

SEQ ID NO: 1224 - RNA, 19 nt, Influenza A virus
auagugaaugcaccaaauc

SEQ ID NO: 1225 - RNA, 19 nt, Influenza A virus
uagugaaugcaccaaauca

SEQ ID NO: 1226 - RNA, 19 nt, Influenza A virus
gccauggugucuagggccc

SEQ ID NO: 1227 - RNA, 19 nt, Influenza A virus
gacaacaugaccaagaaaa

SEQ ID NO: 1228 - RNA, 19 nt, Influenza A virus
ugggcauguucaacaugcu

SEQ ID NO: 1229 - RNA, 19 nt, Influenza A virus
ccauggugucuagggcccg

SEQ ID NO: 1230 - RNA, 19 nt, Influenza A virus
caacaugaccaagaaaaug

SEQ ID NO: 1231 - RNA, 19 nt, Influenza A virus
ugaaugcaccaaaucauga

SEQ ID NO: 1232 - RNA, 19 nt, Influenza A virus
gugaaugcaccaaaucaug

SEQ ID NO: 1233 - RNA, 19 nt, Influenza A virus
agaucaugaagaucuguuc

SEQ ID NO: 1234 - RNA, 19 nt, Influenza A virus
ucaugagggaauacaagca

SEQ ID NO: 1235 - RNA, 19 nt, Influenza A virus
cagcgcaaaaugccauaag

SEQ ID NO: 1236 - RNA, 19 nt, Influenza A virus
gaauucuugaggaugaaca

SEQ ID NO: 1237 - RNA, 19 nt, Influenza A virus
gaucaugaagaucuguucc

SEQ ID NO: 1238 - RNA, 19 nt, Influenza A virus
agugaaugcaccaaaucau

SEQ ID NO: 1239 - RNA, 19 nt, Influenza A virus
ggaauucuugaggaugaac

SEQ ID NO: 1240 - RNA, 19 nt, Influenza A virus
ggccauggugucuagggcc

SEQ ID NO: 1241 - RNA, 19 nt, Influenza A virus
aucaugagggaauacaagc

SEQ ID NO: 1242 - RNA, 19 nt, Influenza A virus
cauagugaaugcaccaaau

SEQ ID NO: 1243 - RNA, 19 nt, Influenza A virus
ccuccauacagccauggaa

SEQ ID NO: 1244 - RNA, 19 nt, Influenza A virus
auacaagcaggaguggaua

SEQ ID NO: 1245 - RNA, 19 nt, Influenza A virus
cuccauacagccauggaac

SEQ ID NO: 1246 - RNA, 19 nt, Influenza A virus
aaucaugagggaauacaag

SEQ ID NO: 1247 - RNA, 19 nt, Influenza A virus
uccauacagccauggaaca

SEQ ID NO: 1248 - RNA, 19 nt, Influenza A virus
uacaagcaggaguggauag

SEQ ID NO: 1249 - RNA, 19 nt, Influenza A virus
uguucucaaacaaaauggc

SEQ ID NO: 1250 - RNA, 19 nt, Influenza A virus
auguucucaaacaaaaugg

SEQ ID NO: 1251 - RNA, 19 nt, Influenza A virus
ucacacaaagaacaauagg

SEQ ID NO: 1252 - RNA, 19 nt, Influenza A virus
auggucacacaaagaacaa

SEQ ID NO: 1253 - RNA, 19 nt, Influenza A virus
uacaccauggacacaguca

SEQ ID NO: 1254 - RNA, 19 nt, Influenza A virus
uggucacacaaagaacaau

SEQ ID NO: 1255 - RNA, 19 nt, Influenza A virus
gucacacaaagaacaauag

SEQ ID NO: 1256 - RNA, 19 nt, Influenza A virus
ggucacacaaagaacaaua

SEQ ID NO: 1257 - RNA, 19 nt, Influenza A virus
acaccauggacacagucaa

SEQ ID NO: 1258 - RNA, 19 nt, Influenza A virus
ccagcgcaaaaugccauaa

SEQ ID NO: 1259 - RNA, 19 nt, Influenza A virus
gcaugguggaggccauggu

SEQ ID NO: 1260 - RNA, 19 nt, Influenza A virus
uugauggaccacuaccuga

SEQ ID NO: 1261 - RNA, 19 nt, Influenza A virus
agcaugguggaggccaugg

SEQ ID NO: 1262 - RNA, 19 nt, Influenza A virus
aaugcaccaaaucaugagg

SEQ ID NO: 1263 - RNA, 19 nt, Influenza A virus
aauguucucaaacaaaaug

SEQ ID NO: 1264 - RNA, 19 nt, Influenza A virus
augcaccaaaucaugaggg

SEQ ID NO: 1265 - RNA, 19 nt, Influenza A virus
augguggaggccauggugu

SEQ ID NO: 1266 - RNA, 19 nt, Influenza A virus
gguggaggccauggugucu

SEQ ID NO: 1267 - RNA, 19 nt, Influenza A virus
auugauggaccacuaccug

SEQ ID NO: 1268 - RNA, 19 nt, Influenza A virus
ugguggaggccaugguguc

SEQ ID NO: 1269 - RNA, 19 nt, Influenza A virus
auaauguucucaaacaaaa

SEQ ID NO: 1270 - RNA, 19 nt, Influenza A virus
uaauguucucaaacaaaau

SEQ ID NO: 1271 - RNA, 19 nt, Influenza A virus
guggaggccauggugucua

SEQ ID NO: 1272 - RNA, 19 nt, Influenza A virus
uggcaaauguugugagaaa

SEQ ID NO: 1273 - RNA, 19 nt, Influenza A virus
gaaugcaccaaaucaugag

SEQ ID NO: 1274 - RNA, 19 nt, Influenza A virus
aauggucacacaaagaaca

SEQ ID NO: 1275 - RNA, 19 nt, Influenza A virus
gauccuccauacagccaug

SEQ ID NO: 1276 - RNA, 19 nt, Influenza A virus
auccuccauacagccaugg

SEQ ID NO: 1277 - RNA, 19 nt, Influenza A virus
caugguggaggccauggug

SEQ ID NO: 1278 - RNA, 19 nt, Influenza A virus
aaauggucacacaaagaac

SEQ ID NO: 1279 - RNA, 19 nt, Influenza A virus
gcauguucaacaugcuaag

SEQ ID NO: 1280 - RNA, 19 nt, Influenza A virus
agggaauacaagcaggagu

SEQ ID NO: 1281 - RNA, 19 nt, Influenza A virus
gggcauguucaacaugcua

SEQ ID NO: 1282 - RNA, 19 nt, Influenza A virus
ggcauguucaacaugcuaa

SEQ ID NO: 1283 - RNA, 19 nt, Influenza A virus
accauggacacagucaaca

SEQ ID NO: 1284 - RNA, 19 nt, Influenza A virus
gauaugcacaaacagacug

SEQ ID NO: 1285 - RNA, 19 nt, Influenza A virus
aaaauggucacacaaagaa

SEQ ID NO: 1286 - RNA, 19 nt, Influenza A virus
ccauggacacagucaacag

SEQ ID NO: 1287 - RNA, 19 nt, Influenza A virus
ggauaugcacaaacagacu

SEQ ID NO: 1288 - RNA, 19 nt, Influenza A virus
caccauggacacagucaac

SEQ ID NO: 1289 - RNA, 19 nt, Influenza A virus
acacagucaacagaacaca

SEQ ID NO: 1290 - RNA, 19 nt, Influenza A virus
gacacagucaacagaacac

SEQ ID NO: 1291 - RNA, 19 nt, Influenza A virus
gagggaauacaagcaggag

SEQ ID NO: 1292 - RNA, 19 nt, Influenza A virus
auguucaacaugcuaagua

SEQ ID NO: 1293 - RNA, 19 nt, Influenza A virus
acauucccuuauacuggag

SEQ ID NO: 1294 - RNA, 19 nt, Influenza A virus
uguucaacaugcuaaguac

SEQ ID NO: 1295 - RNA, 19 nt, Influenza A virus
cauucccuuauacuggaga

SEQ ID NO: 1296 - RNA, 19 nt, Influenza A virus
aagaaaauggucacacaaa

SEQ ID NO: 1297 - RNA, 19 nt, Influenza A virus
aauacaagcaggaguggau

SEQ ID NO: 1298 - RNA, 19 nt, Influenza A virus
agaaaauggucacacaaag

SEQ ID NO: 1299 - RNA, 19 nt, Influenza A virus
gaauacaagcaggagugga

SEQ ID NO: 1300 - RNA, 19 nt, Influenza A virus
ggaauacaagcaggagugg

SEQ ID NO: 1301 - RNA, 19 nt, Influenza A virus
ugagggaauacaagcagga

SEQ ID NO: 1302 - RNA, 19 nt, Influenza A virus
gggaauacaagcaggagug

SEQ ID NO: 1303 - RNA, 19 nt, Influenza A virus
ggacacagucaacagaaca

SEQ ID NO: 1304 - RNA, 19 nt, Influenza A virus
aagcaggaguggauagauu

SEQ ID NO: 1305 - RNA, 19 nt, Influenza A virus
uugaggaugaacagaugua

SEQ ID NO: 1306 - RNA, 19 nt, Influenza A virus
uggacacagucaacagaac

SEQ ID NO: 1307 - RNA, 19 nt, Influenza A virus
auggacacagucaacagaa

SEQ ID NO: 1308 - RNA, 19 nt, Influenza A virus
aaaucaugagggaauacaa

SEQ ID NO: 1309 - RNA, 19 nt, Influenza A virus
caagcaggaguggauagau

SEQ ID NO: 1310 - RNA, 19 nt, Influenza A virus
caaaucaugagggaauaca

SEQ ID NO: 1311 - RNA, 19 nt, Influenza A virus
cauggacacagucaacaga

SEQ ID NO: 1312 - RNA, 19 nt, Influenza A virus
cuugaggaugaacagaugu

SEQ ID NO: 1313 - RNA, 19 nt, Influenza A virus
acaagcaggaguggauaga

SEQ ID NO: 1314 - RNA, 19 nt, Influenza A virus
cauguucaacaugcuaagu

SEQ ID NO: 1315 - RNA, 19 nt, Influenza A virus
uaacagugauaaagaacaa

SEQ ID NO: 1316 - RNA, 19 nt, Influenza A virus
gaaaauggucacacaaaga

SEQ ID NO: 1317 - RNA, 19 nt, Influenza A virus
ugcaccaaaucaugaggga

SEQ ID NO: 1318 - RNA, 19 nt, Influenza A virus
ggcuaauagauuuccucaa

SEQ ID NO: 1319 - RNA, 19 nt, Influenza A virus
uccuccauacagccaugga

SEQ ID NO: 1320 - RNA, 19 nt, Influenza A virus
caccaaaucaugagggaau

SEQ ID NO: 1321 - RNA, 19 nt, Influenza A virus
ccaaaucaugagggaauac

SEQ ID NO: 1322 - RNA, 19 nt, Influenza A virus
accaaaucaugagggaaua

SEQ ID NO: 1323 - RNA, 19 nt, Influenza A virus
gcaccaaaucaugagggaa

SEQ ID NO: 1324 - RNA, 19 nt, Influenza A virus
guaacagugauaaagaaca

SEQ ID NO: 1325 - RNA, 19 nt, Influenza A virus
ucuugaggaugaacagaug

SEQ ID NO: 1326 - RNA, 19 nt, Influenza A virus
aauucuugaggaugaacag

SEQ ID NO: 1327 - RNA, 19 nt, Influenza A virus
agauccuccauacagccau

SEQ ID NO: 1328 - RNA, 19 nt, Influenza A virus
uuccagcgcaaaaugccau

SEQ ID NO: 1329 - RNA, 19 nt, Influenza A virus
cuggagauccuccauacag

SEQ ID NO: 1330 - RNA, 19 nt, Influenza A virus
acaacaugauaaacaauga

SEQ ID NO: 1331 - RNA, 19 nt, Influenza A virus
gagauccuccauacagcca

SEQ ID NO: 1332 - RNA, 19 nt, Influenza A virus
aacaacaugauaaacaaug

SEQ ID NO: 1333 - RNA, 19 nt, Influenza A virus
acuggagauccuccauaca

SEQ ID NO: 1334 - RNA, 19 nt, Influenza A virus
ggagauccuccauacagcc

SEQ ID NO: 1335 - RNA, 19 nt, Influenza A virus
uccagcgcaaaaugccaua

SEQ ID NO: 1336 - RNA, 19 nt, Influenza A virus
uucuugaggaugaacagau

SEQ ID NO: 1337 - RNA, 19 nt, Influenza A virus
auucuugaggaugaacaga

SEQ ID NO: 1338 - RNA, 19 nt, Influenza A virus
aggggaauucuugaggaug

SEQ ID NO: 1339 - RNA, 19 nt, Influenza A virus
uggagauccuccauacagc

SEQ ID NO: 1340 - RNA, 19 nt, Influenza A virus
augaugacuaauucacaag

SEQ ID NO: 1341 - RNA, 19 nt, Influenza A virus
ugaugacuaauucacaaga

SEQ ID NO: 1342 - RNA, 19 nt, Influenza A virus
guggauaugcacaaacaga

SEQ ID NO: 1343 - RNA, 19 nt, Influenza A virus
uggauaugcacaaacagac

SEQ ID NO: 1344 - RNA, 19 nt, Influenza A virus
agugauaaagaacaacaug

SEQ ID NO: 1345 - RNA, 19 nt, Influenza A virus
acagugauaaagaacaaca

SEQ ID NO: 1346 - RNA, 19 nt, Influenza A virus
ggggaauucuugaggauga

SEQ ID NO: 1347 - RNA, 19 nt, Influenza A virus
uaaagaacaacaugauaaa

SEQ ID NO: 1348 - RNA, 19 nt, Influenza A virus
cagugauaaagaacaacau

SEQ ID NO: 1349 - RNA, 19 nt, Influenza A virus
uugacuucgagucuggacg

SEQ ID NO: 1350 - RNA, 19 nt, Influenza A virus
aaagaacaacaugauaaac

SEQ ID NO: 1351 - RNA, 19 nt, Influenza A virus
agaacaacaugauaaacaa

SEQ ID NO: 1352 - RNA, 19 nt, Influenza A virus
gggaauucuugaggaugaa

SEQ ID NO: 1353 - RNA, 19 nt, Influenza A virus
caggaguggauagauucua

SEQ ID NO: 1354 - RNA, 19 nt, Influenza A virus
aguggauaugcacaaacag

SEQ ID NO: 1355 - RNA, 19 nt, Influenza A virus
aagaacaacaugauaaaca

SEQ ID NO: 1356 - RNA, 19 nt, Influenza A virus
auaaagaacaacaugauaa

SEQ ID NO: 1357 - RNA, 19 nt, Influenza A virus
uggugucuagggcccggau

SEQ ID NO: 1358 - RNA, 19 nt, Influenza A virus
ugauaaagaacaacaugau

SEQ ID NO: 1359 - RNA, 19 nt, Influenza A virus
agcaggaguggauagauuc

SEQ ID NO: 1360 - RNA, 19 nt, Influenza A virus
gugauaaagaacaacauga

SEQ ID NO: 1361 - RNA, 19 nt, Influenza A virus
gcaggaguggauagauucu

SEQ ID NO: 1362 - RNA, 19 nt, Influenza A virus
gauaaagaacaacaugaua

SEQ ID NO: 1363 - RNA, 19 nt, Influenza A virus
auggugucuagggcccgga

SEQ ID NO: 1364 - RNA, 19 nt, Influenza A virus
ugucuagggcccggauuga

SEQ ID NO: 1365 - RNA, 19 nt, Influenza A virus
cauggugucuagggcccgg

SEQ ID NO: 1366 - RNA, 19 nt, Influenza A virus
gaacaacaugauaaacaau

SEQ ID NO: 1367 - RNA, 19 nt, Influenza A virus
ugacuaauucacaagacac

SEQ ID NO: 1368 - RNA, 19 nt, Influenza A virus
ggaaggcuaauagauuucc

SEQ ID NO: 1369 - RNA, 19 nt, Influenza A virus
uucccuuauacuggagauc

SEQ ID NO: 1370 - RNA, 19 nt, Influenza A virus
ucccuuauacuggagaucc

SEQ ID NO: 1371 - RNA, 19 nt, Influenza A virus
gaaggcuaauagauuuccu

SEQ ID NO: 1372 - RNA, 19 nt, Influenza A virus
auugacuucgagucuggac

SEQ ID NO: 1373 - RNA, 19 nt, Influenza A virus
ggugucuagggcccggauu

SEQ ID NO: 1374 - RNA, 19 nt, Influenza A virus
uaauagauuuccucaagga

SEQ ID NO: 1375 - RNA, 19 nt, Influenza A virus
aacagugauaaagaacaac

SEQ ID NO: 1376 - RNA, 19 nt, Influenza A virus
gugucuagggcccggauug

SEQ ID NO: 1377 - RNA, 19 nt, Influenza A virus
acuucgagucuggacggau

SEQ ID NO: 1378 - RNA, 19 nt, Influenza A virus
acaugauaaacaaugaccu

SEQ ID NO: 1379 - RNA, 19 nt, Influenza A virus
guuccagcgcaaaaugcca

SEQ ID NO: 1380 - RNA, 19 nt, Influenza A virus
augacuaauucacaagaca

SEQ ID NO: 1381 - RNA, 19 nt, Influenza A virus
aacaugauaaacaaugacc

SEQ ID NO: 1382 - RNA, 19 nt, Influenza A virus
cuagggcccggauugaugc

SEQ ID NO: 1383 - RNA, 19 nt, Influenza A virus
gaugacuaauucacaagac

SEQ ID NO: 1384 - RNA, 19 nt, Influenza A virus
ucuagggcccggauugaug

SEQ ID NO: 1385 - RNA, 19 nt, Influenza A virus
auucccuuauacuggagau

SEQ ID NO: 1386 - RNA, 19 nt, Influenza A virus
uugcaacuacacacuccug

SEQ ID NO: 1387 - RNA, 19 nt, Influenza A virus
uaagagacaacaugaccaa

SEQ ID NO: 1388 - RNA, 19 nt, Influenza A virus
ugcaacuacacacuccugg

SEQ ID NO: 1389 - RNA, 19 nt, Influenza A virus
caacaugauaaacaaugac

SEQ ID NO: 1390 - RNA, 19 nt, Influenza A virus
guugcaacuacacacuccu

SEQ ID NO: 1391 - RNA, 19 nt, Influenza A virus
ccagcaacagcccagaugg

SEQ ID NO: 1392 - RNA, 19 nt, Influenza A virus
cagcaacagcccagauggc

SEQ ID NO: 1393 - RNA, 19 nt, Influenza A virus
gacuucgagucuggacgga

SEQ ID NO: 1394 - RNA, 19 nt, Influenza A virus
aacuggcaaauguugugag

SEQ ID NO: 1395 - RNA, 19 nt, Influenza A virus
gcaacuacacacuccugga

SEQ ID NO: 1396 - RNA, 19 nt, Influenza A virus
cuggcaaauguugugagaa

SEQ ID NO: 1397 - RNA, 19 nt, Influenza A virus
aaacuggcaaauguuguga

SEQ ID NO: 1398 - RNA, 19 nt, Influenza A virus
aagugggagcuaauggaug

SEQ ID NO: 1399 - RNA, 19 nt, Influenza A virus
cuaauagauuuccucaagg

SEQ ID NO: 1400 - RNA, 19 nt, Influenza A virus
agugggagcuaauggauga

SEQ ID NO: 1401 - RNA, 19 nt, Influenza A virus
uaugcacaaacagacugug

SEQ ID NO: 1402 - RNA, 19 nt, Influenza A virus
caacuacacacuccuggau

SEQ ID NO: 1403 - RNA, 19 nt, Influenza A virus
acuggcaaauguugugaga

SEQ ID NO: 1404 - RNA, 19 nt, Influenza A virus
augcacaaacagacugugu

SEQ ID NO: 1405 - RNA, 19 nt, Influenza A virus
ugaauggaugucaauccga

SEQ ID NO: 1406 - RNA, 19 nt, Influenza A virus
gaauggaugucaauccgac

SEQ ID NO: 1407 - RNA, 19 nt, Influenza A virus
gagucuggacggauuaaga

SEQ ID NO: 1408 - RNA, 19 nt, Influenza A virus
ugacuucgagucuggacgg

SEQ ID NO: 1409 - RNA, 19 nt, Influenza A virus
gucuagggcccggauugau

SEQ ID NO: 1410 - RNA, 19 nt, Influenza A virus
aacuacacacuccuggauu

SEQ ID NO: 1411 - RNA, 19 nt, Influenza A virus
uugaauggaugucaauccg

SEQ ID NO: 1412 - RNA, 19 nt, Influenza A virus
gagacaacaugaccaagaa

SEQ ID NO: 1413 - RNA, 19 nt, Influenza A virus
aggcuaauagauuuccuca

SEQ ID NO: 1414 - RNA, 19 nt, Influenza A virus
cgcaaaaugccauaagcac

SEQ ID NO: 1415 - RNA, 19 nt, Influenza A virus
agucuggacggauuaagaa

SEQ ID NO: 1416 - RNA, 19 nt, Influenza A virus
auaugcacaaacagacugu

SEQ ID NO: 1417 - RNA, 19 nt, Influenza A virus
uuugaauggaugucaaucc

SEQ ID NO: 1418 - RNA, 19 nt, Influenza A virus
gcgcaaaaugccauaagca

SEQ ID NO: 1419 - RNA, 19 nt, Influenza A virus
cuacacacuccuggauucc

SEQ ID NO: 1420 - RNA, 19 nt, Influenza A virus
uucgagucuggacggauua

SEQ ID NO: 1421 - RNA, 19 nt, Influenza A virus
ucgagucuggacggauuaa

SEQ ID NO: 1422 - RNA, 19 nt, Influenza A virus
aaggcuaauagauuuccuc

SEQ ID NO: 1423 - RNA, 19 nt, Influenza A virus
agagacaacaugaccaaga

SEQ ID NO: 1424 - RNA, 19 nt, Influenza A virus
cgagucuggacggauuaag

SEQ ID NO: 1425 - RNA, 19 nt, Influenza A virus
acuacacacuccuggauuc

SEQ ID NO: 1426 - RNA, 19 nt, Influenza A virus
agaguaagagacaacauga

SEQ ID NO: 1427 - RNA, 19 nt, Influenza A virus
agcgcaaaaugccauaagc

SEQ ID NO: 1428 - RNA, 19 nt, Influenza A virus
aguaagagacaacaugacc

SEQ ID NO: 1429 - RNA, 19 nt, Influenza A virus
guaagagacaacaugacca

SEQ ID NO: 1430 - RNA, 19 nt, Influenza A virus
ucaauggauaaagaggaaa

SEQ ID NO: 1431 - RNA, 19 nt, Influenza A virus
aagagacaacaugaccaag

SEQ ID NO: 1432 - RNA, 19 nt, Influenza A virus
caauggauaaagaggaaau

SEQ ID NO: 1433 - RNA, 19 nt, Influenza A virus
gaguaagagacaacaugac

SEQ ID NO: 1434 - RNA, 19 nt, Influenza A virus
gccaaaggggaauucuuga

SEQ ID NO: 1435 - RNA, 19 nt, Influenza A virus
agacaacaugaccaagaaa

SEQ ID NO: 1436 - RNA, 19 nt, Influenza A virus
cuucgagucuggacggauu

SEQ ID NO: 1437 - RNA, 19 nt, Influenza A virus
augauuacauauaucacaa

SEQ ID NO: 1438 - RNA, 19 nt, Influenza A virus
agccaaaggggaauucuug

SEQ ID NO: 1439 - RNA, 19 nt, Influenza A virus
ggaccagcaacagcccaga

SEQ ID NO: 1440 - RNA, 19 nt, Influenza A virus
gaccagcaacagcccagau

SEQ ID NO: 1441 - RNA, 19 nt, Influenza A virus
ugauuacauauaucacaaa

SEQ ID NO: 1442 - RNA, 19 nt, Influenza A virus
auagauuuccucaaggaug

SEQ ID NO: 1443 - RNA, 19 nt, Influenza A virus
accagcaacagcccagaug

SEQ ID NO: 1444 - RNA, 19 nt, Influenza A virus
acauauaucacaaaaaauc

SEQ ID NO: 1445 - RNA, 19 nt, Influenza A virus
uagauuuccucaaggaugu

SEQ ID NO: 1446 - RNA, 19 nt, Influenza A virus
cauauaucacaaaaaauca

SEQ ID NO: 1447 - RNA, 19 nt, Influenza A virus
auuacauauaucacaaaaa

SEQ ID NO: 1448 - RNA, 19 nt, Influenza A virus
gauuacauauaucacaaaa

SEQ ID NO: 1449 - RNA, 19 nt, Influenza A virus
ccaaacuggcaaauguugu

SEQ ID NO: 1450 - RNA, 19 nt, Influenza A virus
auugagaaaauaaggccuc

SEQ ID NO: 1451 - RNA, 19 nt, Influenza A virus
uugagaaaauaaggccucu

SEQ ID NO: 1452 - RNA, 19 nt, Influenza A virus
auuggaguaacagugauaa

SEQ ID NO: 1453 - RNA, 19 nt, Influenza A virus
agcuugaacagucuggacu

SEQ ID NO: 1454 - RNA, 19 nt, Influenza A virus
gccaaacuggcaaauguug

SEQ ID NO: 1455 - RNA, 19 nt, Influenza A virus
uuggaguaacagugauaaa

SEQ ID NO: 1456 - RNA, 19 nt, Influenza A virus
aagcuugaacagucuggac

SEQ ID NO: 1457 - RNA, 19 nt, Influenza A virus
gcuaauagauuuccucaag

SEQ ID NO: 1458 - RNA, 19 nt, Influenza A virus
aggaguggauagauucuac

SEQ ID NO: 1459 - RNA, 19 nt, Influenza A virus
caugauaaacaaugaccuu

SEQ ID NO: 1460 - RNA, 19 nt, Influenza A virus
accuuggaccagcaacagc

SEQ ID NO: 1461 - RNA, 19 nt, Influenza A virus
gaccuuggaccagcaacag

SEQ ID NO: 1462 - RNA, 19 nt, Influenza A virus
aagaaaauugagaaaauaa

SEQ ID NO: 1463 - RNA, 19 nt, Influenza A virus
agggcccggauugaugcca

SEQ ID NO: 1464 - RNA, 19 nt, Influenza A virus
ggaguaacagugauaaaga

SEQ ID NO: 1465 - RNA, 19 nt, Influenza A virus
gggcccggauugaugccag

SEQ ID NO: 1466 - RNA, 19 nt, Influenza A virus
uagggcccggauugaugcc

SEQ ID NO: 1467 - RNA, 19 nt, Influenza A virus
uauacuggagauccuccau

SEQ ID NO: 1468 - RNA, 19 nt, Influenza A virus
agaaaauugagaaaauaag

SEQ ID NO: 1469 - RNA, 19 nt, Influenza A virus
ggcccggauugaugccaga

SEQ ID NO: 1470 - RNA, 19 nt, Influenza A virus
auacuggagauccuccaua

SEQ ID NO: 1471 - RNA, 19 nt, Influenza A virus
uuacauauaucacaaaaaa

SEQ ID NO: 1472 - RNA, 19 nt, Influenza A virus
caacagcccagauggcucu

SEQ ID NO: 1473 - RNA, 19 nt, Influenza A virus
agccauggaacaggaacag

SEQ ID NO: 1474 - RNA, 19 nt, Influenza A virus
gccauggaacaggaacagg

SEQ ID NO: 1475 - RNA, 19 nt, Influenza A virus
uuauacuggagauccucca

SEQ ID NO: 1476 - RNA, 19 nt, Influenza A virus
caaacuggcaaauguugug

SEQ ID NO: 1477 - RNA, 19 nt, Influenza A virus
uacuggagauccuccauac

SEQ ID NO: 1478 - RNA, 19 nt, Influenza A virus
gaguaacagugauaaagaa

SEQ ID NO: 1479 - RNA, 19 nt, Influenza A virus
cuuauacuggagauccucc

SEQ ID NO: 1480 - RNA, 19 nt, Influenza A virus
ccuuauacuggagauccuc

SEQ ID NO: 1481 - RNA, 19 nt, Influenza A virus
gaauugacuucgagucugg

SEQ ID NO: 1482 - RNA, 19 nt, Influenza A virus
aagaaguccuauauaaaua

SEQ ID NO: 1483 - RNA, 19 nt, Influenza A virus
gcaacagcccagauggcuc

SEQ ID NO: 1484 - RNA, 19 nt, Influenza A virus
auuugaauggaugucaauc

SEQ ID NO: 1485 - RNA, 19 nt, Influenza A virus
gccagaauugacuucgagu

SEQ ID NO: 1486 - RNA, 19 nt, Influenza A virus
ccagaauugacuucgaguc

SEQ ID NO: 1487 - RNA, 19 nt, Influenza A virus
caaaggggaauucuugagg

SEQ ID NO: 1488 - RNA, 19 nt, Influenza A virus
cagaauugacuucgagucu

SEQ ID NO: 1489 - RNA, 19 nt, Influenza A virus
aaaggggaauucuugagga

SEQ ID NO: 1490 - RNA, 19 nt, Influenza A virus
ucagcugauaugagcauug

SEQ ID NO: 1491 - RNA, 19 nt, Influenza A virus
cccggauugaugccagaau

SEQ ID NO: 1492 - RNA, 19 nt, Influenza A virus
gaguggauagauucuacag

SEQ ID NO: 1493 - RNA, 19 nt, Influenza A virus
aguaacagugauaaagaac

SEQ ID NO: 1494 - RNA, 19 nt, Influenza A virus
uacauauaucacaaaaaau

SEQ ID NO: 1495 - RNA, 19 nt, Influenza A virus
cagcugauaugagcauugg

SEQ ID NO: 1496 - RNA, 19 nt, Influenza A virus
ggaguggauagauucuaca

SEQ ID NO: 1497 - RNA, 19 nt, Influenza A virus
agaauugacuucgagucug

SEQ ID NO: 1498 - RNA, 19 nt, Influenza A virus
cgaugauuacauauaucac

SEQ ID NO: 1499 - RNA, 19 nt, Influenza A virus
aaggggaauucuugaggau

SEQ ID NO: 1500 - RNA, 19 nt, Influenza A virus
gauuuccucaaggauguga

SEQ ID NO: 1501 - RNA, 19 nt, Influenza A virus
cugauaugagcauuggagu

SEQ ID NO: 1502 - RNA, 19 nt, Influenza A virus
gcugauaugagcauuggag

SEQ ID NO: 1503 - RNA, 19 nt, Influenza A virus
gcccggauugaugccagaa

SEQ ID NO: 1504 - RNA, 19 nt, Influenza A virus
aauagauuuccucaaggau

SEQ ID NO: 1505 - RNA, 19 nt, Influenza A virus
aggccaaacuggcaaaugu

SEQ ID NO: 1506 - RNA, 19 nt, Influenza A virus
uggaguaacagugauaaag

SEQ ID NO: 1507 - RNA, 19 nt, Influenza A virus
ugagcauuggaguaacagu

SEQ ID NO: 1508 - RNA, 19 nt, Influenza A virus
ccggauugaugccagaauu

SEQ ID NO: 1509 - RNA, 19 nt, Influenza A virus
augagcauuggaguaacag

SEQ ID NO: 1510 - RNA, 19 nt, Influenza A virus
auuuccucaaggaugugau

SEQ ID NO: 1511 - RNA, 19 nt, Influenza A virus
gcgaugauuacauauauca

SEQ ID NO: 1512 - RNA, 19 nt, Influenza A virus
aaggccaaacuggcaaaug

SEQ ID NO: 1513 - RNA, 19 nt, Influenza A virus
agcugauaugagcauugga

SEQ ID NO: 1514 - RNA, 19 nt, Influenza A virus
cauuggaguaacagugaua

SEQ ID NO: 1515 - RNA, 19 nt, Influenza A virus
agauuuccucaaggaugug

SEQ ID NO: 1516 - RNA, 19 nt, Influenza A virus
agcaacagcccagauggcu

SEQ ID NO: 1517 - RNA, 19 nt, Influenza A virus
ggccaaacuggcaaauguu

SEQ ID NO: 1518 - RNA, 19 nt, Influenza A virus
gcauuggaguaacagugau

SEQ ID NO: 1519 - RNA, 19 nt, Influenza A virus
agcauuggaguaacaguga

SEQ ID NO: 1520 - RNA, 19 nt, Influenza A virus
cccuuauacuggagauccu

SEQ ID NO: 1521 - RNA, 19 nt, Influenza A virus
ggauugaugccagaauuga

SEQ ID NO: 1522 - RNA, 19 nt, Influenza A virus
cggauugaugccagaauug

SEQ ID NO: 1523 - RNA, 19 nt, Influenza A virus
agaaggccaaacuggcaaa

SEQ ID NO: 1524 - RNA, 19 nt, Influenza A virus
gaugauuacauauaucaca

SEQ ID NO: 1525 - RNA, 19 nt, Influenza A virus
acagccauggaacaggaac

SEQ ID NO: 1526 - RNA, 19 nt, Influenza A virus
aagaaggccaaacuggcaa

SEQ ID NO: 1527 - RNA, 19 nt, Influenza A virus
gaaggccaaacuggcaaau

SEQ ID NO: 1528 - RNA, 19 nt, Influenza A virus
auaugagcauuggaguaac

SEQ ID NO: 1529 - RNA, 19 nt, Influenza A virus
uaugagcauuggaguaaca

SEQ ID NO: 1530 - RNA, 19 nt, Influenza A virus
uacagccauggaacaggaa

SEQ ID NO: 1531 - RNA, 19 nt, Influenza A virus
cuuggaccagcaacagccc

SEQ ID NO: 1532 - RNA, 19 nt, Influenza A virus
auugaugccagaauugacu

SEQ ID NO: 1533 - RNA, 19 nt, Influenza A virus
gagcauuggaguaacagug

SEQ ID NO: 1534 - RNA, 19 nt, Influenza A virus
uuggaccagcaacagccca

SEQ ID NO: 1535 - RNA, 19 nt, Influenza A virus
augccagaauugacuucga

SEQ ID NO: 1536 - RNA, 19 nt, Influenza A virus
uugaugccagaauugacuu

SEQ ID NO: 1537 - RNA, 19 nt, Influenza A virus
gauaugagcauuggaguaa

SEQ ID NO: 1538 - RNA, 19 nt, Influenza A virus
gaugccagaauugacuucg

SEQ ID NO: 1539 - RNA, 19 nt, Influenza A virus
aauugacuucgagucugga

SEQ ID NO: 1540 - RNA, 19 nt, Influenza A virus
ugauaugagcauuggagua

SEQ ID NO: 1541 - RNA, 19 nt, Influenza A virus
auacagccauggaacagga

SEQ ID NO: 1542 - RNA, 19 nt, Influenza A virus
cagccauggaacaggaaca

SEQ ID NO: 1543 - RNA, 19 nt, Influenza A virus
ugaugccagaauugacuuc

SEQ ID NO: 1544 - RNA, 19 nt, Influenza A virus
gauugaugccagaauugac

SEQ ID NO: 1545 - RNA, 19 nt, Influenza A virus
uggaccagcaacagcccag

SEQ ID NO: 1546 - RNA, 19 nt, Influenza A virus
cugaaucuugggcaaaaga

SEQ ID NO: 1547 - RNA, 19 nt, Influenza A virus
ugauggaccacuaccugag

SEQ ID NO: 1548 - RNA, 19 nt, Influenza A virus
ugccagaauugacuucgag

SEQ ID NO: 1549 - RNA, 19 nt, Influenza A virus
uggcgaugauuacauauau

SEQ ID NO: 1550 - RNA, 19 nt, Influenza A virus
gugggagcuaauggaugag

SEQ ID NO: 1551 - RNA, 19 nt, Influenza A virus
ggcgaugauuacauauauc

SEQ ID NO: 1552 - RNA, 19 nt, Influenza A virus
uaaagugggagcuaaugga

SEQ ID NO: 1553 - RNA, 19 nt, Influenza A virus
aaagugggagcuaauggau

SEQ ID NO: 1554 - RNA, 19 nt, Influenza A virus
uugaauucacaagcuuuuu

SEQ ID NO: 1555 - RNA, 19 nt, Influenza A virus
uuugaauucacaagcuuuu

SEQ ID NO: 1556 - RNA, 19 nt, Influenza A virus
aaaauugagaaaauaaggc

SEQ ID NO: 1557 - RNA, 19 nt, Influenza A virus
ccuuggaccagcaacagcc

SEQ ID NO: 1558 - RNA, 19 nt, Influenza A virus
uaaacaaugaccuuggacc

SEQ ID NO: 1559 - RNA, 19 nt, Influenza A virus
gauggaccacuaccugagg

SEQ ID NO: 1560 - RNA, 19 nt, Influenza A virus
aaauugagaaaauaaggcc

SEQ ID NO: 1561 - RNA, 19 nt, Influenza A virus
auuugaauucacaagcuuu

SEQ ID NO: 1562 - RNA, 19 nt, Influenza A virus
ccaaaggggaauucuugag

SEQ ID NO: 1563 - RNA, 19 nt, Influenza A virus
cauuugaauucacaagcuu

SEQ ID NO: 1564 - RNA, 19 nt, Influenza A virus
auggaccacuaccugagga

SEQ ID NO: 1565 - RNA, 19 nt, Influenza A virus
acauuugaauucacaagcu

SEQ ID NO: 1566 - RNA, 19 nt, Influenza A virus
acacacuccuggauuccca

SEQ ID NO: 1567 - RNA, 19 nt, Influenza A virus
cacacuccuggauucccaa

SEQ ID NO: 1568 - RNA, 19 nt, Influenza A virus
acacuccuggauucccaag

SEQ ID NO: 1569 - RNA, 19 nt, Influenza A virus
gauaaacaaugaccuugga

SEQ ID NO: 1570 - RNA, 19 nt, Influenza A virus
auaucacaaaaaaucaacc

SEQ ID NO: 1571 - RNA, 19 nt, Influenza A virus
cacuccuggauucccaaga

SEQ ID NO: 1572 - RNA, 19 nt, Influenza A virus
gaggagacacacaaauuca

SEQ ID NO: 1573 - RNA, 19 nt, Influenza A virus
acuccuggauucccaagag

SEQ ID NO: 1574 - RNA, 19 nt, Influenza A virus
agaucauucgagcuaaaga

SEQ ID NO: 1575 - RNA, 19 nt, Influenza A virus
uacacacuccuggauuccc

SEQ ID NO: 1576 - RNA, 19 nt, Influenza A virus
agaggagacacacaaauuc

SEQ ID NO: 1577 - RNA, 19 nt, Influenza A virus
uauaucacaaaaaaucaac

SEQ ID NO: 1578 - RNA, 19 nt, Influenza A virus
aucacaaaaaaucaaccug

SEQ ID NO: 1579 - RNA, 19 nt, Influenza A virus
auauaucacaaaaaaucaa

SEQ ID NO: 1580 - RNA, 19 nt, Influenza A virus
auaaacaaugaccuuggac

SEQ ID NO: 1581 - RNA, 19 nt, Influenza A virus
uguucgagaaauuuuuccc

SEQ ID NO: 1582 - RNA, 19 nt, Influenza A virus
aacccaauugauggaccac

SEQ ID NO: 1583 - RNA, 19 nt, Influenza A virus
ucacaaaaaaucaaccuga

SEQ ID NO: 1584 - RNA, 19 nt, Influenza A virus
acccaauugauggaccacu

SEQ ID NO: 1585 - RNA, 19 nt, Influenza A virus
caaacagacuguguccugg

SEQ ID NO: 1586 - RNA, 19 nt, Influenza A virus
aaacagacuguguccugga

SEQ ID NO: 1587 - RNA, 19 nt, Influenza A virus
gaaaauugagaaaauaagg

SEQ ID NO: 1588 - RNA, 19 nt, Influenza A virus
caagccaaaggggaauucu

SEQ ID NO: 1589 - RNA, 19 nt, Influenza A virus
acaaacagacuguguccug

SEQ ID NO: 1590 - RNA, 19 nt, Influenza A virus
acaagccaaaggggaauuc

SEQ ID NO: 1591 - RNA, 19 nt, Influenza A virus
cacaaacagacuguguccu

SEQ ID NO: 1592 - RNA, 19 nt, Influenza A virus
aagccaaaggggaauucuu

SEQ ID NO: 1593 - RNA, 19 nt, Influenza A virus
ccaauugauggaccacuac

SEQ ID NO: 1594 - RNA, 19 nt, Influenza A virus
aacaaugaccuuggaccag

SEQ ID NO: 1595 - RNA, 19 nt, Influenza A virus
uggauucccaagaggaacc

SEQ ID NO: 1596 - RNA, 19 nt, Influenza A virus
gcacaaacagacugugucc

SEQ ID NO: 1597 - RNA, 19 nt, Influenza A virus
acaaugaccuuggaccagc

SEQ ID NO: 1598 - RNA, 19 nt, Influenza A virus
caauugauggaccacuacc

SEQ ID NO: 1599 - RNA, 19 nt, Influenza A virus
aaacaaugaccuuggacca

SEQ ID NO: 1600 - RNA, 19 nt, Influenza A virus
uccuugaagaaucccaccc

SEQ ID NO: 1601 - RNA, 19 nt, Influenza A virus
ugcacaaacagacuguguc

SEQ ID NO: 1602 - RNA, 19 nt, Influenza A virus
uuccuugaagaaucccacc

SEQ ID NO: 1603 - RNA, 19 nt, Influenza A virus
aauaaggccucuucuaaua

SEQ ID NO: 1604 - RNA, 19 nt, Influenza A virus
ggauucccaagaggaaccg

SEQ ID NO: 1605 - RNA, 19 nt, Influenza A virus
uaucacaaaaaaucaaccu

SEQ ID NO: 1606 - RNA, 19 nt, Influenza A virus
uugaagaaucccacccagg

SEQ ID NO: 1607 - RNA, 19 nt, Influenza A virus
cuugaagaaucccacccag

SEQ ID NO: 1608 - RNA, 19 nt, Influenza A virus
ccuggauucccaagaggaa

SEQ ID NO: 1609 - RNA, 19 nt, Influenza A virus
accacauucccuuauacug

SEQ ID NO: 1610 - RNA, 19 nt, Influenza A virus
cccaauugauggaccacua

SEQ ID NO: 1611 - RNA, 19 nt, Influenza A virus
aauugagaaaauaaggccu

SEQ ID NO: 1612 - RNA, 19 nt, Influenza A virus
uccuggauucccaagagga

SEQ ID NO: 1613 - RNA, 19 nt, Influenza A virus
ccacauucccuuauacugg

SEQ ID NO: 1614 - RNA, 19 nt, Influenza A virus
ccuugaagaaucccaccca

SEQ ID NO: 1615 - RNA, 19 nt, Influenza A virus
aacacaagccaaaggggaa

SEQ ID NO: 1616 - RNA, 19 nt, Influenza A virus
augaccuuggaccagcaac

SEQ ID NO: 1617 - RNA, 19 nt, Influenza A virus
uaaggccucuucuaauaga

SEQ ID NO: 1618 - RNA, 19 nt, Influenza A virus
aaugaccuuggaccagcaa

SEQ ID NO: 1619 - RNA, 19 nt, Influenza A virus
acacaagccaaaggggaau

SEQ ID NO: 1620 - RNA, 19 nt, Influenza A virus
gaucauucgagcuaaagaa

SEQ ID NO: 1621 - RNA, 19 nt, Influenza A virus
ugaccuuggaccagcaaca

SEQ ID NO: 1622 - RNA, 19 nt, Influenza A virus
cuccuggauucccaagagg

SEQ ID NO: 1623 - RNA, 19 nt, Influenza A virus
cuggauucccaagaggaac

SEQ ID NO: 1624 - RNA, 19 nt, Influenza A virus
caaugaccuuggaccagca

SEQ ID NO: 1625 - RNA, 19 nt, Influenza A virus
cacaagccaaaggggaauu

SEQ ID NO: 1626 - RNA, 19 nt, Influenza A virus
ucauucgagcuaaagaagc

SEQ ID NO: 1627 - RNA, 19 nt, Influenza A virus
auaaggccucuucuaauag

SEQ ID NO: 1628 - RNA, 19 nt, Influenza A virus
cauucgagcuaaagaagcu

SEQ ID NO: 1629 - RNA, 19 nt, Influenza A virus
aucauucgagcuaaagaag

SEQ ID NO: 1630 - RNA, 19 nt, Influenza A virus
caaaaugccauaagcacca

SEQ ID NO: 1631 - RNA, 19 nt, Influenza A virus
aaaugccauaagcaccaca

SEQ ID NO: 1632 - RNA, 19 nt, Influenza A virus
aaaaugccauaagcaccac

SEQ ID NO: 1633 - RNA, 19 nt, Influenza A virus
gcaaaaugccauaagcacc

SEQ ID NO: 1634 - RNA, 19 nt, Influenza A virus
augccauaagcaccacauu

SEQ ID NO: 1635 - RNA, 19 nt, Influenza A virus
aaugccauaagcaccacau

SEQ ID NO: 1636 - RNA, 19 nt, Influenza A virus
uaagcaccacauucccuua

SEQ ID NO: 1637 - RNA, 19 nt, Influenza A virus
auaagcaccacauucccuu

SEQ ID NO: 1638 - RNA, 19 nt, Influenza A virus
uucaacaugcuaaguacgg

SEQ ID NO: 1639 - RNA, 19 nt, Influenza A virus
uuccucaaggaugugaugg

SEQ ID NO: 1640 - RNA, 19 nt, Influenza A virus
guucaacaugcuaaguacg

SEQ ID NO: 1641 - RNA, 19 nt, Influenza A virus
uuuccucaaggaugugaug

SEQ ID NO: 1642 - RNA, 19 nt, Influenza A virus
gaaucaauggauaaagagg

SEQ ID NO: 1643 - RNA, 19 nt, Influenza A virus
ucaacaugcuaaguacggu

SEQ ID NO: 1644 - RNA, 19 nt, Influenza A virus
ccaagaggaaccgcucuau

SEQ ID NO: 1645 - RNA, 19 nt, Influenza A virus
cugagaucaugaagaucug

SEQ ID NO: 1646 - RNA, 19 nt, Influenza A virus
cccaagaggaaccgcucua

SEQ ID NO: 1647 - RNA, 19 nt, Influenza A virus
ugccauaagcaccacauuc

SEQ ID NO: 1648 - RNA, 19 nt, Influenza A virus
ucccaagaggaaccgcucu

SEQ ID NO: 1649 - RNA, 19 nt, Influenza A virus
gccauaagcaccacauucc

SEQ ID NO: 1650 - RNA, 19 nt, Influenza A virus
uucccaagaggaaccgcuc

SEQ ID NO: 1651 - RNA, 19 nt, Influenza A virus
aaucaauggauaaagagga

SEQ ID NO: 1652 - RNA, 19 nt, Influenza A virus
uuaaagugggagcuaaugg

SEQ ID NO: 1653 - RNA, 19 nt, Influenza A virus
ccauaagcaccacauuccc

SEQ ID NO: 1654 - RNA, 19 nt, Influenza A virus
cauaagcaccacauucccu

SEQ ID NO: 1655 - RNA, 19 nt, Influenza A virus
auucccaagaggaaccgcu

SEQ ID NO: 1656 - RNA, 19 nt, Influenza A virus
gauucccaagaggaaccgc

SEQ ID NO: 1657 - RNA, 19 nt, Influenza A virus
uccucaaggaugugaugga

SEQ ID NO: 1658 - RNA, 19 nt, Influenza A virus
ugagaaaauaaggccucuu

SEQ ID NO: 1659 - RNA, 19 nt, Influenza A virus
aagaggaaccgcucuauuc

SEQ ID NO: 1660 - RNA, 19 nt, Influenza A virus
gagacacacaaauucagac

SEQ ID NO: 1661 - RNA, 19 nt, Influenza A virus
caagaggaaccgcucuauu

SEQ ID NO: 1662 - RNA, 19 nt, Influenza A virus
ggagacacacaaauucaga

SEQ ID NO: 1663 - RNA, 19 nt, Influenza A virus
ugagaucaugaagaucugu

SEQ ID NO: 1664 - RNA, 19 nt, Influenza A virus
gagcuaaagaagcuguggg

SEQ ID NO: 1665 - RNA, 19 nt, Influenza A virus
agaggaaccgcucuauucu

SEQ ID NO: 1666 - RNA, 19 nt, Influenza A virus
agcuaaagaagcuguggga

SEQ ID NO: 1667 - RNA, 19 nt, Influenza A virus
agaaaauaaggccucuucu

SEQ ID NO: 1668 - RNA, 19 nt, Influenza A virus
aaaauaaggccucuucuaa

SEQ ID NO: 1669 - RNA, 19 nt, Influenza A virus
cacauucccuuauacugga

SEQ ID NO: 1670 - RNA, 19 nt, Influenza A virus
gaagucugcuuaaaguggg

SEQ ID NO: 1671 - RNA, 19 nt, Influenza A virus
aaauaaggccucuucuaau

SEQ ID NO: 1672 - RNA, 19 nt, Influenza A virus
gagaaaauaaggccucuuc

SEQ ID NO: 1673 - RNA, 19 nt, Influenza A virus
agucugcuuaaagugggag

SEQ ID NO: 1674 - RNA, 19 nt, Influenza A virus
ccacuaccugaggauaaug

SEQ ID NO: 1675 - RNA, 19 nt, Influenza A virus
aagucugcuuaaaguggga

SEQ ID NO: 1676 - RNA, 19 nt, Influenza A virus
augugauggaaucaaugga

SEQ ID NO: 1677 - RNA, 19 nt, Influenza A virus
gaugugauggaaucaaugg

SEQ ID NO: 1678 - RNA, 19 nt, Influenza A virus
gaaaauaaggccucuucua

SEQ ID NO: 1679 - RNA, 19 nt, Influenza A virus
cacuaccugaggauaauga

SEQ ID NO: 1680 - RNA, 19 nt, Influenza A virus
uucgagcuaaagaagcugu

SEQ ID NO: 1681 - RNA, 19 nt, Influenza A virus
ggaccacuaccugaggaua

SEQ ID NO: 1682 - RNA, 19 nt, Influenza A virus
ucgagcuaaagaagcugug

SEQ ID NO: 1683 - RNA, 19 nt, Influenza A virus
accacuaccugaggauaau

SEQ ID NO: 1684 - RNA, 19 nt, Influenza A virus
gaccacuaccugaggauaa

SEQ ID NO: 1685 - RNA, 19 nt, Influenza A virus
cgagcuaaagaagcugugg

SEQ ID NO: 1686 - RNA, 19 nt, Influenza A virus
ucugcuuaaagugggagcu

SEQ ID NO: 1687 - RNA, 19 nt, Influenza A virus
uggaccacuaccugaggau

SEQ ID NO: 1688 - RNA, 19 nt, Influenza A virus
gucugcuuaaagugggagc

SEQ ID NO: 1689 - RNA, 19 nt, Influenza A virus
gaagcuccgaacacaaaua

SEQ ID NO: 1690 - RNA, 19 nt, Influenza A virus
augaagcuccgaacacaaa

SEQ ID NO: 1691 - RNA, 19 nt, Influenza A virus
ccaguuuuggagugucugg

SEQ ID NO: 1692 - RNA, 19 nt, Influenza A virus
cccaguuuuggagugucug

SEQ ID NO: 1693 - RNA, 19 nt, Influenza A virus
ugaagcuccgaacacaaau

SEQ ID NO: 1694 - RNA, 19 nt, Influenza A virus
cagaaaugcuagcaagcau

SEQ ID NO: 1695 - RNA, 19 nt, Influenza A virus
gugauggaaucaauggaua

SEQ ID NO: 1696 - RNA, 19 nt, Influenza A virus
gcagaaaugcuagcaagca

SEQ ID NO: 1697 - RNA, 19 nt, Influenza A virus
ugugauggaaucaauggau

SEQ ID NO: 1698 - RNA, 19 nt, Influenza A virus
ugcuuaaagugggagcuaa

SEQ ID NO: 1699 - RNA, 19 nt, Influenza A virus
ggugggaugggcuccaauc

SEQ ID NO: 1700 - RNA, 19 nt, Influenza A virus
aagcuccgaacacaaauac

SEQ ID NO: 1701 - RNA, 19 nt, Influenza A virus
uggugggaugggcuccaau

SEQ ID NO: 1702 - RNA, 19 nt, Influenza A virus
gcuuaaagugggagcuaau

SEQ ID NO: 1703 - RNA, 19 nt, Influenza A virus
agcuccgaacacaaauacc

SEQ ID NO: 1704 - RNA, 19 nt, Influenza A virus
cuuaaagugggagcuaaug

SEQ ID NO: 1705 - RNA, 19 nt, Influenza A virus
ugauggaaucaauggauaa

SEQ ID NO: 1706 - RNA, 19 nt, Influenza A virus
cugcuuaaagugggagcua

SEQ ID NO: 1707 - RNA, 19 nt, Influenza A virus
uggaaucaauggauaaaga

SEQ ID NO: 1708 - RNA, 19 nt, Influenza A virus
aaacaaggguggacaaacu

SEQ ID NO: 1709 - RNA, 19 nt, Influenza A virus
gguucagaaacauccugag

SEQ ID NO: 1710 - RNA, 19 nt, Influenza A virus
caacucaacccaauugaug

SEQ ID NO: 1711 - RNA, 19 nt, Influenza A virus
ugguucagaaacauccuga

SEQ ID NO: 1712 - RNA, 19 nt, Influenza A virus
aacucaacccaauugaugg

SEQ ID NO: 1713 - RNA, 19 nt, Influenza A virus
auucgagcuaaagaagcug

SEQ ID NO: 1714 - RNA, 19 nt, Influenza A virus
caaacaaggguggacaaac

SEQ ID NO: 1715 - RNA, 19 nt, Influenza A virus
aucaauggauaaagaggaa

SEQ ID NO: 1716 - RNA, 19 nt, Influenza A virus
auggaaucaauggauaaag

SEQ ID NO: 1717 - RNA, 19 nt, Influenza A virus
guucagaaacauccugagc

SEQ ID NO: 1718 - RNA, 19 nt, Influenza A virus
caacaugcuaaguacgguu

SEQ ID NO: 1719 - RNA, 19 nt, Influenza A virus
uucagaaacauccugagca

SEQ ID NO: 1720 - RNA, 19 nt, Influenza A virus
ggaaucaauggauaaagag

SEQ ID NO: 1721 - RNA, 19 nt, Influenza A virus
ucagaaacauccugagcau

SEQ ID NO: 1722 - RNA, 19 nt, Influenza A virus
caacugcauuagccaacac

SEQ ID NO: 1723 - RNA, 19 nt, Influenza A virus
gcaacugcauuagccaaca

SEQ ID NO: 1724 - RNA, 19 nt, Influenza A virus
aaguggauaugcacaaaca

SEQ ID NO: 1725 - RNA, 19 nt, Influenza A virus
caaguggauaugcacaaac

SEQ ID NO: 1726 - RNA, 19 nt, Influenza A virus
ccaaguggauaugcacaaa

SEQ ID NO: 1727 - RNA, 19 nt, Influenza A virus
agaaacauccugagcaucg

SEQ ID NO: 1728 - RNA, 19 nt, Influenza A virus
acaugcuaaguacgguuuu

SEQ ID NO: 1729 - RNA, 19 nt, Influenza A virus
gaaacauccugagcaucgc

SEQ ID NO: 1730 - RNA, 19 nt, Influenza A virus
aacaugcuaaguacgguuu

SEQ ID NO: 1731 - RNA, 19 nt, Influenza A virus
acacacaaauucagacgag

SEQ ID NO: 1732 - RNA, 19 nt, Influenza A virus
gcaccacauucccuuauac

SEQ ID NO: 1733 - RNA, 19 nt, Influenza A virus
gcuaauuuuagcauggagc

SEQ ID NO: 1734 - RNA, 19 nt, Influenza A virus
acauccugagcaucgcacc

SEQ ID NO: 1735 - RNA, 19 nt, Influenza A virus
aauugauggaccacuaccu

SEQ ID NO: 1736 - RNA, 19 nt, Influenza A virus
cagaaacauccugagcauc

SEQ ID NO: 1737 - RNA, 19 nt, Influenza A virus
agcaccacauucccuuaua

SEQ ID NO: 1738 - RNA, 19 nt, Influenza A virus
gacacacaaauucagacga

SEQ ID NO: 1739 - RNA, 19 nt, Influenza A virus
aacauccugagcaucgcac

SEQ ID NO: 1740 - RNA, 19 nt, Influenza A virus
aagcaccacauucccuuau

SEQ ID NO: 1741 - RNA, 19 nt, Influenza A virus
cuaauuuuagcauggagcu

SEQ ID NO: 1742 - RNA, 19 nt, Influenza A virus
aaacauccugagcaucgca

SEQ ID NO: 1743 - RNA, 19 nt, Influenza A virus
caccacauucccuuauacu

SEQ ID NO: 1744 - RNA, 19 nt, Influenza A virus
gauggaaucaauggauaaa

SEQ ID NO: 1745 - RNA, 19 nt, Influenza A virus
agacacacaaauucagacg

SEQ ID NO: 1746 - RNA, 19 nt, Influenza A virus
aaggaugugauggaaucaa

SEQ ID NO: 1747 - RNA, 19 nt, Influenza A virus
aggaugugauggaaucaau

SEQ ID NO: 1748 - RNA, 19 nt, Influenza A virus
ugggaugggcuccaauccu

SEQ ID NO: 1749 - RNA, 19 nt, Influenza A virus
augccguugcaacuacaca

SEQ ID NO: 1750 - RNA, 19 nt, Influenza A virus
ugaugccguugcaacuaca

SEQ ID NO: 1751 - RNA, 19 nt, Influenza A virus
gugggaugggcuccaaucc

SEQ ID NO: 1752 - RNA, 19 nt, Influenza A virus
gaugccguugcaacuacac

SEQ ID NO: 1753 - RNA, 19 nt, Influenza A virus
augaugccguugcaacuac

SEQ ID NO: 1754 - RNA, 19 nt, Influenza A virus
uaugaugccguugcaacua

SEQ ID NO: 1755 - RNA, 19 nt, Influenza A virus
gggaugggcuccaauccuc

SEQ ID NO: 1756 - RNA, 19 nt, Influenza A virus
aauggaugucaauccgacu

SEQ ID NO: 1757 - RNA, 19 nt, Influenza A virus
ggaugugauggaaucaaug

SEQ ID NO: 1758 - RNA, 19 nt, Influenza A virus
gauuuguggcuaauuuuag

SEQ ID NO: 1759 - RNA, 19 nt, Influenza A virus
ggauuuguggcuaauuuua

SEQ ID NO: 1760 - RNA, 19 nt, Influenza A virus
ggcacagcaucauugagcc

SEQ ID NO: 1761 - RNA, 19 nt, Influenza A virus
guggcuaauuuuagcaugg

SEQ ID NO: 1762 - RNA, 19 nt, Influenza A virus
uuuguggcuaauuuuagca

SEQ ID NO: 1763 - RNA, 19 nt, Influenza A virus
gcacagcaucauugagccc

SEQ ID NO: 1764 - RNA, 19 nt, Influenza A virus
uggcuaauuuuagcaugga

SEQ ID NO: 1765 - RNA, 19 nt, Influenza A virus
ggcuaauuuuagcauggag

SEQ ID NO: 1766 - RNA, 19 nt, Influenza A virus
uggauuuguggcuaauuuu

SEQ ID NO: 1767 - RNA, 19 nt, Influenza A virus
uauggauuuguggcuaauu

SEQ ID NO: 1768 - RNA, 19 nt, Influenza A virus
uguggcuaauuuuagcaug

SEQ ID NO: 1769 - RNA, 19 nt, Influenza A virus
auggauuuguggcuaauuu

SEQ ID NO: 1770 - RNA, 19 nt, Influenza A virus
uuguggcuaauuuuagcau

SEQ ID NO: 1771 - RNA, 19 nt, Influenza A virus
caaggaugugauggaauca

SEQ ID NO: 1772 - RNA, 19 nt, Influenza A virus
acuaccugaggauaaugag

SEQ ID NO: 1773 - RNA, 19 nt, Influenza A virus
cucaaggaugugauggaau

SEQ ID NO: 1774 - RNA, 19 nt, Influenza A virus
gcccucauagugaaugcac

SEQ ID NO: 1775 - RNA, 19 nt, Influenza A virus
cuaccugaggauaaugagc

SEQ ID NO: 1776 - RNA, 19 nt, Influenza A virus
ucaaggaugugauggaauc

SEQ ID NO: 1777 - RNA, 19 nt, Influenza A virus
auaugaugccguugcaacu

SEQ ID NO: 1778 - RNA, 19 nt, Influenza A virus
gaauaugaugccguugcaa

SEQ ID NO: 1779 - RNA, 19 nt, Influenza A virus
uaccugaggauaaugagcc

SEQ ID NO: 1780 - RNA, 19 nt, Influenza A virus
aauaugaugccguugcaac

SEQ ID NO: 1781 - RNA, 19 nt, Influenza A virus
cccucauagugaaugcacc

SEQ ID NO: 1782 - RNA, 19 nt, Influenza A virus
auuuguggcuaauuuuagc

SEQ ID NO: 1783 - RNA, 19 nt, Influenza A virus
uggaauaugaugccguugc

SEQ ID NO: 1784 - RNA, 19 nt, Influenza A virus
agaacacaccaauauucag

SEQ ID NO: 1785 - RNA, 19 nt, Influenza A virus
ggaauaugaugccguugca

SEQ ID NO: 1786 - RNA, 19 nt, Influenza A virus
caacaaacaaggguggaca

SEQ ID NO: 1787 - RNA, 19 nt, Influenza A virus
ccucauagugaaugcacca

SEQ ID NO: 1788 - RNA, 19 nt, Influenza A virus
cagcaucauugagcccugg

SEQ ID NO: 1789 - RNA, 19 nt, Influenza A virus
acagcaucauugagcccug

SEQ ID NO: 1790 - RNA, 19 nt, Influenza A virus
cacagcaucauugagcccu

SEQ ID NO: 1791 - RNA, 19 nt, Influenza A virus
auggaauaugaugccguug

SEQ ID NO: 1792 - RNA, 19 nt, Influenza A virus
agaaguccuauauaaauaa

SEQ ID NO: 1793 - RNA, 19 nt, Influenza A virus
cuguuccaccauugaagaa

SEQ ID NO: 1794 - RNA, 19 nt, Influenza A virus
aaguacgguuuuaggaguc

SEQ ID NO: 1795 - RNA, 19 nt, Influenza A virus
gaacacaccaauauucaga

SEQ ID NO: 1796 - RNA, 19 nt, Influenza A virus
cucagacggcaaaaauaau

SEQ ID NO: 1797 - RNA, 19 nt, Influenza A virus
aguacgguuuuaggagucu

SEQ ID NO: 1798 - RNA, 19 nt, Influenza A virus
ugcuaaguacgguuuuagg

SEQ ID NO: 1799 - RNA, 19 nt, Influenza A virus
guacgguuuuaggagucuc

SEQ ID NO: 1800 - RNA, 19 nt, Influenza A virus
caugcuaaguacgguuuua

SEQ ID NO: 1801 - RNA, 19 nt, Influenza A virus
uaaguacgguuuuaggagu

SEQ ID NO: 1802 - RNA, 19 nt, Influenza A virus
uccaccauugaagaacuca

SEQ ID NO: 1803 - RNA, 19 nt, Influenza A virus
aggagacacacaaauucag

SEQ ID NO: 1804 - RNA, 19 nt, Influenza A virus
augcuaaguacgguuuuag

SEQ ID NO: 1805 - RNA, 19 nt, Influenza A virus
agguuccagcgcaaaaugc

SEQ ID NO: 1806 - RNA, 19 nt, Influenza A virus
aagguuccagcgcaaaaug

SEQ ID NO: 1807 - RNA, 19 nt, Influenza A virus
aaagguuccagcgcaaaau

SEQ ID NO: 1808 - RNA, 19 nt, Influenza A virus
uaaagguuccagcgcaaaa

SEQ ID NO: 1809 - RNA, 19 nt, Influenza A virus
uguuccaccauugaagaac

SEQ ID NO: 1810 - RNA, 19 nt, Influenza A virus
guuccaccauugaagaacu

SEQ ID NO: 1811 - RNA, 19 nt, Influenza A virus
cauugaagaacucagacgg

SEQ ID NO: 1812 - RNA, 19 nt, Influenza A virus
cuaaguacgguuuuaggag

SEQ ID NO: 1813 - RNA, 19 nt, Influenza A virus
ccauugaagaacucagacg

SEQ ID NO: 1814 - RNA, 19 nt, Influenza A virus
accauugaagaacucagac

SEQ ID NO: 1815 - RNA, 19 nt, Influenza A virus
gcuaaguacgguuuuagga

SEQ ID NO: 1816 - RNA, 19 nt, Influenza A virus
uuccaccauugaagaacuc

SEQ ID NO: 1817 - RNA, 19 nt, Influenza A virus
caccauugaagaacucaga

SEQ ID NO: 1818 - RNA, 19 nt, Influenza A virus
auugaagaacucagacggc

SEQ ID NO: 1819 - RNA, 19 nt, Influenza A virus
guggauagauucuacagga

SEQ ID NO: 1820 - RNA, 19 nt, Influenza A virus
gguuccagcgcaaaaugcc

SEQ ID NO: 1821 - RNA, 19 nt, Influenza A virus
uugaagaacucagacggca

SEQ ID NO: 1822 - RNA, 19 nt, Influenza A virus
gagcuuucuuucacaauca

SEQ ID NO: 1823 - RNA, 19 nt, Influenza A virus
cuugaacagucuggacuuc

SEQ ID NO: 1824 - RNA, 19 nt, Influenza A virus
ccaccauugaagaacucag

SEQ ID NO: 1825 - RNA, 19 nt, Influenza A virus
aguggauagauucuacagg

SEQ ID NO: 1826 - RNA, 19 nt, Influenza A virus
agcuuucuuucacaaucac

SEQ ID NO: 1827 - RNA, 19 nt, Influenza A virus
uugaacagucuggacuucc

SEQ ID NO: 1828 - RNA, 19 nt, Influenza A virus
uugcaacacccgggaugca

SEQ ID NO: 1829 - RNA, 19 nt, Influenza A virus
uucaacaaacaagggugga

SEQ ID NO: 1830 - RNA, 19 nt, Influenza A virus
auugcaacacccgggaugc

SEQ ID NO: 1831 - RNA, 19 nt, Influenza A virus
augucaauccgacucuacu

SEQ ID NO: 1832 - RNA, 19 nt, Influenza A virus
ugcccucauagugaaugca

SEQ ID NO: 1833 - RNA, 19 nt, Influenza A virus
uggaugucaauccgacucu

SEQ ID NO: 1834 - RNA, 19 nt, Influenza A virus
uugcccucauagugaaugc

SEQ ID NO: 1835 - RNA, 19 nt, Influenza A virus
gcaacacccgggaugcaaa

SEQ ID NO: 1836 - RNA, 19 nt, Influenza A virus
caacacccgggaugcaaau

SEQ ID NO: 1837 - RNA, 19 nt, Influenza A virus
ugcaacacccgggaugcaa

SEQ ID NO: 1838 - RNA, 19 nt, Influenza A virus
uuugcccucauagugaaug

SEQ ID NO: 1839 - RNA, 19 nt, Influenza A virus
auggaugucaauccgacuc

SEQ ID NO: 1840 - RNA, 19 nt, Influenza A virus
acagaacacaccaauauuc

SEQ ID NO: 1841 - RNA, 19 nt, Influenza A virus
cagaacacaccaauauuca

SEQ ID NO: 1842 - RNA, 19 nt, Influenza A virus
aacagaacacaccaauauu

SEQ ID NO: 1843 - RNA, 19 nt, Influenza A virus
aggaugaacagauguacca

SEQ ID NO: 1844 - RNA, 19 nt, Influenza A virus
auuuugcccucauagugaa

SEQ ID NO: 1845 - RNA, 19 nt, Influenza A virus
ugaagaacucagacggcaa

SEQ ID NO: 1846 - RNA, 19 nt, Influenza A virus
gcuugaacagucuggacuu

SEQ ID NO: 1847 - RNA, 19 nt, Influenza A virus
gaagaacucagacggcaaa

SEQ ID NO: 1848 - RNA, 19 nt, Influenza A virus
ugaggaugaacagauguac

SEQ ID NO: 1849 - RNA, 19 nt, Influenza A virus
uuuugcccucauagugaau

SEQ ID NO: 1850 - RNA, 19 nt, Influenza A virus
gaugucaauccgacucuac

SEQ ID NO: 1851 - RNA, 19 nt, Influenza A virus
gauuuugcccucauaguga

SEQ ID NO: 1852 - RNA, 19 nt, Influenza A virus
ggaugucaauccgacucua

SEQ ID NO: 1853 - RNA, 19 nt, Influenza A virus
gaggaugaacagauguacc

SEQ ID NO: 1854 - RNA, 19 nt, Influenza A virus
ugagcaaaaagaaguccua

SEQ ID NO: 1855 - RNA, 19 nt, Influenza A virus
augagcaaaaagaaguccu

SEQ ID NO: 1856 - RNA, 19 nt, Influenza A virus
aagaacucagacggcaaaa

SEQ ID NO: 1857 - RNA, 19 nt, Influenza A virus
guucaacaaacaagggugg

SEQ ID NO: 1858 - RNA, 19 nt, Influenza A virus
ucaacagaacacaccaaua

SEQ ID NO: 1859 - RNA, 19 nt, Influenza A virus
gucaacagaacacaccaau

SEQ ID NO: 1860 - RNA, 19 nt, Influenza A virus
caacagaacacaccaauau

SEQ ID NO: 1861 - RNA, 19 nt, Influenza A virus
gcuauugcaacacccggga

SEQ ID NO: 1862 - RNA, 19 nt, Influenza A virus
uucacaagcuuuuuuuauc

SEQ ID NO: 1863 - RNA, 19 nt, Influenza A virus
cuauugcaacacccgggau

SEQ ID NO: 1864 - RNA, 19 nt, Influenza A virus
aauucacaagcuuuuuuua

SEQ ID NO: 1865 - RNA, 19 nt, Influenza A virus
ugaauucacaagcuuuuuu

SEQ ID NO: 1866 - RNA, 19 nt, Influenza A virus
gaauucacaagcuuuuuuu

SEQ ID NO: 1867 - RNA, 19 nt, Influenza A virus
uauugcaacacccgggaug

SEQ ID NO: 1868 - RNA, 19 nt, Influenza A virus
ucacaagcuuuuuuuaucg

SEQ ID NO: 1869 - RNA, 19 nt, Influenza A virus
guucucaaacaaaauggca

SEQ ID NO: 1870 - RNA, 19 nt, Influenza A virus
uucucaaacaaaauggcaa

SEQ ID NO: 1871 - RNA, 19 nt, Influenza A virus
agaagggcuauugcaacac

SEQ ID NO: 1872 - RNA, 19 nt, Influenza A virus
gaaguuuuuagaucgaaug

SEQ ID NO: 1873 - RNA, 19 nt, Influenza A virus
ugccuugaaacaauggaag

SEQ ID NO: 1874 - RNA, 19 nt, Influenza A virus
agaacucagacggcaaaaa

SEQ ID NO: 1875 - RNA, 19 nt, Influenza A virus
auucacaagcuuuuuuuau

SEQ ID NO: 1876 - RNA, 19 nt, Influenza A virus
gaagggcuauugcaacacc

SEQ ID NO: 1877 - RNA, 19 nt, Influenza A virus
ucucaaacaaaauggcaag

SEQ ID NO: 1878 - RNA, 19 nt, Influenza A virus
uacauguucgagaguaaga

SEQ ID NO: 1879 - RNA, 19 nt, Influenza A virus
ucugagaucaugaagaucu

SEQ ID NO: 1880 - RNA, 19 nt, Influenza A virus
aagaagggcuauugcaaca

SEQ ID NO: 1881 - RNA, 19 nt, Influenza A virus
acauguucgagaguaagag

SEQ ID NO: 1882 - RNA, 19 nt, Influenza A virus
gaaaaggauacauguucga

SEQ ID NO: 1883 - RNA, 19 nt, Influenza A virus
ggaaaaggauacauguucg

SEQ ID NO: 1884 - RNA, 19 nt, Influenza A virus
aaagaagggcuauugcaac

SEQ ID NO: 1885 - RNA, 19 nt, Influenza A virus
aaaagaagggcuauugcaa

SEQ ID NO: 1886 - RNA, 19 nt, Influenza A virus
gaacucagacggcaaaaau

SEQ ID NO: 1887 - RNA, 19 nt, Influenza A virus
ucaacaaacaaggguggac

SEQ ID NO: 1888 - RNA, 19 nt, Influenza A virus
ccugagugguucagaaaca

SEQ ID NO: 1889 - RNA, 19 nt, Influenza A virus
caaacaaaauggcaagacu

SEQ ID NO: 1890 - RNA, 19 nt, Influenza A virus
cugagugguucagaaacau

SEQ ID NO: 1891 - RNA, 19 nt, Influenza A virus
ucaaacaaaauggcaagac

SEQ ID NO: 1892 - RNA, 19 nt, Influenza A virus
agaaguuuuuagaucgaau

SEQ ID NO: 1893 - RNA, 19 nt, Influenza A virus
aacucagacggcaaaaaua

SEQ ID NO: 1894 - RNA, 19 nt, Influenza A virus
auagaaguuuuuagaucga

SEQ ID NO: 1895 - RNA, 19 nt, Influenza A virus
ggauacauguucgagagua

SEQ ID NO: 1896 - RNA, 19 nt, Influenza A virus
uagaaguuuuuagaucgaa

SEQ ID NO: 1897 - RNA, 19 nt, Influenza A virus
cucaaacaaaauggcaaga

SEQ ID NO: 1898 - RNA, 19 nt, Influenza A virus
agaagaucauucgagcuaa

SEQ ID NO: 1899 - RNA, 19 nt, Influenza A virus
auacauguucgagaguaag

SEQ ID NO: 1900 - RNA, 19 nt, Influenza A virus
aucaacaugagcaaaaaga

SEQ ID NO: 1901 - RNA, 19 nt, Influenza A virus
ucaacaugagcaaaaagaa

SEQ ID NO: 1902 - RNA, 19 nt, Influenza A virus
agugguucagaaacauccu

SEQ ID NO: 1903 - RNA, 19 nt, Influenza A virus
gauacauguucgagaguaa

SEQ ID NO: 1904 - RNA, 19 nt, Influenza A virus
ggaaucaacaugagcaaaa

SEQ ID NO: 1905 - RNA, 19 nt, Influenza A virus
gagugguucagaaacaucc

SEQ ID NO: 1906 - RNA, 19 nt, Influenza A virus
gugguucagaaacauccug

SEQ ID NO: 1907 - RNA, 19 nt, Influenza A virus
aaaagaaguccuauauaaa

SEQ ID NO: 1908 - RNA, 19 nt, Influenza A virus
ugagugguucagaaacauc

SEQ ID NO: 1909 - RNA, 19 nt, Influenza A virus
gaaucaacaugagcaaaaa

SEQ ID NO: 1910 - RNA, 19 nt, Influenza A virus
ccucaaggaugugauggaa

SEQ ID NO: 1911 - RNA, 19 nt, Influenza A virus
aaaaagaaguccuauauaa

SEQ ID NO: 1912 - RNA, 19 nt, Influenza A virus
uaacaacacacuuucaaag

SEQ ID NO: 1913 - RNA, 19 nt, Influenza A virus
aaucaacaugagcaaaaag

SEQ ID NO: 1914 - RNA, 19 nt, Influenza A virus
uuucuuucacaaucacugg

SEQ ID NO: 1915 - RNA, 19 nt, Influenza A virus
auaacaacacacuuucaaa

SEQ ID NO: 1916 - RNA, 19 nt, Influenza A virus
ugacauugaacacgaugac

SEQ ID NO: 1917 - RNA, 19 nt, Influenza A virus
gaagaucauucgagcuaaa

SEQ ID NO: 1918 - RNA, 19 nt, Influenza A virus
acucaacccaauugaugga

SEQ ID NO: 1919 - RNA, 19 nt, Influenza A virus
caccauagaaguuuuuaga

SEQ ID NO: 1920 - RNA, 19 nt, Influenza A virus
cucaacccaauugauggac

SEQ ID NO: 1921 - RNA, 19 nt, Influenza A virus
ucaacccaauugauggacc

SEQ ID NO: 1922 - RNA, 19 nt, Influenza A virus
caacccaauugauggacca

SEQ ID NO: 1923 - RNA, 19 nt, Influenza A virus
uugacauugaacacgauga

SEQ ID NO: 1924 - RNA, 19 nt, Influenza A virus
acacacuuucaaagaaaaa

SEQ ID NO: 1925 - RNA, 19 nt, Influenza A virus
uucucugagaucaugaaga

SEQ ID NO: 1926 - RNA, 19 nt, Influenza A virus
acaccauagaaguuuuuag

SEQ ID NO: 1927 - RNA, 19 nt, Influenza A virus
cacacuuucaaagaaaaag

SEQ ID NO: 1928 - RNA, 19 nt, Influenza A virus
aacaccauagaaguuuuua

SEQ ID NO: 1929 - RNA, 19 nt, Influenza A virus
accauagaaguuuuuagau

SEQ ID NO: 1930 - RNA, 19 nt, Influenza A virus
acaacacacuuucaaagaa

SEQ ID NO: 1931 - RNA, 19 nt, Influenza A virus
cucugagaucaugaagauc

SEQ ID NO: 1932 - RNA, 19 nt, Influenza A virus
aacaacacacuuucaaaga

SEQ ID NO: 1933 - RNA, 19 nt, Influenza A virus
gauaacaacacacuuucaa

SEQ ID NO: 1934 - RNA, 19 nt, Influenza A virus
gagauaacaacacacuuuc

SEQ ID NO: 1935 - RNA, 19 nt, Influenza A virus
aacacacuuucaaagaaaa

SEQ ID NO: 1936 - RNA, 19 nt, Influenza A virus
ucucugagaucaugaagau

SEQ ID NO: 1937 - RNA, 19 nt, Influenza A virus
ugccagcccaugguccagc

SEQ ID NO: 1938 - RNA, 19 nt, Influenza A virus
acgagaagaucauucgagc

SEQ ID NO: 1939 - RNA, 19 nt, Influenza A virus
cgagaagaucauucgagcu

SEQ ID NO: 1940 - RNA, 19 nt, Influenza A virus
agauaacaacacacuuuca

SEQ ID NO: 1941 - RNA, 19 nt, Influenza A virus
caacacacuuucaaagaaa

SEQ ID NO: 1942 - RNA, 19 nt, Influenza A virus
ccauagaaguuuuuagauc

SEQ ID NO: 1943 - RNA, 19 nt, Influenza A virus
gccagcccaugguccagcc

SEQ ID NO: 1944 - RNA, 19 nt, Influenza A virus
aaacuggggcaccccaacu

SEQ ID NO: 1945 - RNA, 19 nt, Influenza A virus
cagaaacuggggcacccca

SEQ ID NO: 1946 - RNA, 19 nt, Influenza A virus
agaaacuggggcaccccaa

SEQ ID NO: 1947 - RNA, 19 nt, Influenza A virus
acagaaacuggggcacccc

SEQ ID NO: 1948 - RNA, 19 nt, Influenza A virus
aaagaaguccuauauaaau

SEQ ID NO: 1949 - RNA, 19 nt, Influenza A virus
cgaugaccaaagaugcaga

SEQ ID NO: 1950 - RNA, 19 nt, Influenza A virus
acgaugaccaaagaugcag

SEQ ID NO: 1951 - RNA, 19 nt, Influenza A virus
gaaacuggggcaccccaac

SEQ ID NO: 1952 - RNA, 19 nt, Influenza A virus
ccagcccaugguccagcca

SEQ ID NO: 1953 - RNA, 19 nt, Influenza A virus
gagaagaucauucgagcua

SEQ ID NO: 1954 - RNA, 19 nt, Influenza A virus
aggauacauguucgagagu

SEQ ID NO: 1955 - RNA, 19 nt, Influenza A virus
gccuugaaacaauggaagu

SEQ ID NO: 1956 - RNA, 19 nt, Influenza A virus
aaggauacauguucgagag

SEQ ID NO: 1957 - RNA, 19 nt, Influenza A virus
auaaugagccaaguggaua

SEQ ID NO: 1958 - RNA, 19 nt, Influenza A virus
aaaggauacauguucgaga

SEQ ID NO: 1959 - RNA, 19 nt, Influenza A virus
guaagagaaugaagcuccg

SEQ ID NO: 1960 - RNA, 19 nt, Influenza A virus
acaugagcaaaaagaaguc

SEQ ID NO: 1961 - RNA, 19 nt, Influenza A virus
ccguugcaacuacacacuc

SEQ ID NO: 1962 - RNA, 19 nt, Influenza A virus
gagccaaguggauaugcac

SEQ ID NO: 1963 - RNA, 19 nt, Influenza A virus
aaguuuuuagaucgaaugg

SEQ ID NO: 1964 - RNA, 19 nt, Influenza A virus
cuggggcaccccaacucaa

SEQ ID NO: 1965 - RNA, 19 nt, Influenza A virus
aacuggggcaccccaacuc

SEQ ID NO: 1966 - RNA, 19 nt, Influenza A virus
augagccaaguggauaugc

SEQ ID NO: 1967 - RNA, 19 nt, Influenza A virus
aacaugagcaaaaagaagu

SEQ ID NO: 1968 - RNA, 19 nt, Influenza A virus
cagucaacagaacacacca

SEQ ID NO: 1969 - RNA, 19 nt, Influenza A virus
uuucaaagaaaaaggagag

SEQ ID NO: 1970 - RNA, 19 nt, Influenza A virus
ugagccaaguggauaugca

SEQ ID NO: 1971 - RNA, 19 nt, Influenza A virus
ugggaucaaacccaaucaa

SEQ ID NO: 1972 - RNA, 19 nt, Influenza A virus
acuggggcaccccaacuca

SEQ ID NO: 1973 - RNA, 19 nt, Influenza A virus
gccguugcaacuacacacu

SEQ ID NO: 1974 - RNA, 19 nt, Influenza A virus
agccaaguggauaugcaca

SEQ ID NO: 1975 - RNA, 19 nt, Influenza A virus
gccaaguggauaugcacaa

SEQ ID NO: 1976 - RNA, 19 nt, Influenza A virus
aguaagagaaugaagcucc

SEQ ID NO: 1977 - RNA, 19 nt, Influenza A virus
uucaaagaaaaaggagagu

SEQ ID NO: 1978 - RNA, 19 nt, Influenza A virus
acagucaacagaacacacc

SEQ ID NO: 1979 - RNA, 19 nt, Influenza A virus
gcuuucuuucacaaucacu

SEQ ID NO: 1980 - RNA, 19 nt, Influenza A virus
ugggaaucaacaugagcaa

SEQ ID NO: 1981 - RNA, 19 nt, Influenza A virus
ucaaagaaaaaggagagua

SEQ ID NO: 1982 - RNA, 19 nt, Influenza A virus
aaugagccaaguggauaug

SEQ ID NO: 1983 - RNA, 19 nt, Influenza A virus
ggggcaccccaacucaacc

SEQ ID NO: 1984 - RNA, 19 nt, Influenza A virus
acagacuguguccuggagg

SEQ ID NO: 1985 - RNA, 19 nt, Influenza A virus
caacaugagcaaaaagaag

SEQ ID NO: 1986 - RNA, 19 nt, Influenza A virus
ucaaagacuacagauauac

SEQ ID NO: 1987 - RNA, 19 nt, Influenza A virus
gggcaccccaacucaaccc

SEQ ID NO: 1988 - RNA, 19 nt, Influenza A virus
uaaugagccaaguggauau

SEQ ID NO: 1989 - RNA, 19 nt, Influenza A virus
cuuucuuucacaaucacug

SEQ ID NO: 1990 - RNA, 19 nt, Influenza A virus
uggggcaccccaacucaac

SEQ ID NO: 1991 - RNA, 19 nt, Influenza A virus
gugggaaucaacaugagca

SEQ ID NO: 1992 - RNA, 19 nt, Influenza A virus
cagacuguguccuggaggc

SEQ ID NO: 1993 - RNA, 19 nt, Influenza A virus
cguugcaacuacacacucc

SEQ ID NO: 1994 - RNA, 19 nt, Influenza A virus
cacagucaacagaacacac

SEQ ID NO: 1995 - RNA, 19 nt, Influenza A virus
acacgaugaccaaagaugc

SEQ ID NO: 1996 - RNA, 19 nt, Influenza A virus
agucaacagaacacaccaa

SEQ ID NO: 1997 - RNA, 19 nt, Influenza A virus
aacacgaugaccaaagaug

SEQ ID NO: 1998 - RNA, 19 nt, Influenza A virus
augccagcccaugguccag

SEQ ID NO: 1999 - RNA, 19 nt, Influenza A virus
aaagaaaaaggagaguaag

SEQ ID NO: 2000 - RNA, 19 nt, Influenza A virus
caaagaaaaaggagaguaa

SEQ ID NO: 2001 - RNA, 19 nt, Influenza A virus
aacagacuguguccuggag

SEQ ID NO: 2002 - RNA, 19 nt, Influenza A virus
uaaaaagaagggcuauugc

SEQ ID NO: 2003 - RNA, 19 nt, Influenza A virus
cacgaugaccaaagaugca

SEQ ID NO: 2004 - RNA, 19 nt, Influenza A virus
ugccguugcaacuacacac

SEQ ID NO: 2005 - RNA, 19 nt, Influenza A virus
aaauuaaaaagaagggcua

SEQ ID NO: 2006 - RNA, 19 nt, Influenza A virus
aauuaaaaagaagggcuau

SEQ ID NO: 2007 - RNA, 19 nt, Influenza A virus
aaaaagaagggcuauugca

SEQ ID NO: 2008 - RNA, 19 nt, Influenza A virus
uuaaaaagaagggcuauug

SEQ ID NO: 2009 - RNA, 19 nt, Influenza A virus
auuaaaaagaagggcuauu

SEQ ID NO: 2010 - RNA, 19 nt, Influenza A virus
gaacacgaugaccaaagau

SEQ ID NO: 2011 - RNA, 19 nt, Influenza A virus
ugaacacgaugaccaaaga

SEQ ID NO: 2012 - RNA, 19 nt, Influenza A virus
gacauugaacacgaugacc

SEQ ID NO: 2013 - RNA, 19 nt, Influenza A virus
gauaaugagccaaguggau

SEQ ID NO: 2014 - RNA, 19 nt, Influenza A virus
cauugaacacgaugaccaa

SEQ ID NO: 2015 - RNA, 19 nt, Influenza A virus
acauugaacacgaugacca

SEQ ID NO: 2016 - RNA, 19 nt, Influenza A virus
uuugagaacucaugccuug

SEQ ID NO: 2017 - RNA, 19 nt, Influenza A virus
uugagaacucaugccuuga

SEQ ID NO: 2018 - RNA, 19 nt, Influenza A virus
cauagaaguuuuuagaucg

SEQ ID NO: 2019 - RNA, 19 nt, Influenza A virus
cagcccaugguccagccaa

SEQ ID NO: 2020 - RNA, 19 nt, Influenza A virus
agaaugaagcuccgaacac

SEQ ID NO: 2021 - RNA, 19 nt, Influenza A virus
aaugaagcuccgaacacaa

SEQ ID NO: 2022 - RNA, 19 nt, Influenza A virus
gaaugaagcuccgaacaca

SEQ ID NO: 2023 - RNA, 19 nt, Influenza A virus
uagccaacaccauagaagu

SEQ ID NO: 2024 - RNA, 19 nt, Influenza A virus
aaccugagugguucagaaa

SEQ ID NO: 2025 - RNA, 19 nt, Influenza A virus
gccaacaccauagaaguuu

SEQ ID NO: 2026 - RNA, 19 nt, Influenza A virus
ccaacaccauagaaguuuu

SEQ ID NO: 2027 - RNA, 19 nt, Influenza A virus
ugaaucuugggcaaaagaa

SEQ ID NO: 2028 - RNA, 19 nt, Influenza A virus
caaccugagugguucagaa

SEQ ID NO: 2029 - RNA, 19 nt, Influenza A virus
caacaccauagaaguuuuu

SEQ ID NO: 2030 - RNA, 19 nt, Influenza A virus
uaggaaaaggauacauguu

SEQ ID NO: 2031 - RNA, 19 nt, Influenza A virus
gagaacucaugccuugaaa

SEQ ID NO: 2032 - RNA, 19 nt, Influenza A virus
ucaaccugagugguucaga

SEQ ID NO: 2033 - RNA, 19 nt, Influenza A virus
agcaaaaagaaguccuaua

SEQ ID NO: 2034 - RNA, 19 nt, Influenza A virus
agccaacaccauagaaguu

SEQ ID NO: 2035 - RNA, 19 nt, Influenza A virus
gagcaaaaagaaguccuau

SEQ ID NO: 2036 - RNA, 19 nt, Influenza A virus
gcaaaaagaaguccuauau

SEQ ID NO: 2037 - RNA, 19 nt, Influenza A virus
agaacucaugccuugaaac

SEQ ID NO: 2038 - RNA, 19 nt, Influenza A virus
ucaucaaagacuacagaua

SEQ ID NO: 2039 - RNA, 19 nt, Influenza A virus
ugagaacucaugccuugaa

SEQ ID NO: 2040 - RNA, 19 nt, Influenza A virus
uuggaauuucuagcauggu

SEQ ID NO: 2041 - RNA, 19 nt, Influenza A virus
uucaucaaagacuacagau

SEQ ID NO: 2042 - RNA, 19 nt, Influenza A virus
uuagccaacaccauagaag

SEQ ID NO: 2043 - RNA, 19 nt, Influenza A virus
acucagacggcaaaaauaa

SEQ ID NO: 2044 - RNA, 19 nt, Influenza A virus
uugaacacgaugaccaaag

SEQ ID NO: 2045 - RNA, 19 nt, Influenza A virus
aaaagaaauacaccaagac

SEQ ID NO: 2046 - RNA, 19 nt, Influenza A virus
cuaaagguuccagcgcaaa

SEQ ID NO: 2047 - RNA, 19 nt, Influenza A virus
aaucaaccugagugguuca

SEQ ID NO: 2048 - RNA, 19 nt, Influenza A virus
aucaaccugagugguucag

SEQ ID NO: 2049 - RNA, 19 nt, Influenza A virus
acaaaauggcaagacuagg

SEQ ID NO: 2050 - RNA, 19 nt, Influenza A virus
aaaaaucaaccugaguggu

SEQ ID NO: 2051 - RNA, 19 nt, Influenza A virus
caaaaagaaguccuauaua

SEQ ID NO: 2052 - RNA, 19 nt, Influenza A virus
ucuagcaugguggaggcca

SEQ ID NO: 2053 - RNA, 19 nt, Influenza A virus
aaaaucaaccugagugguu

SEQ ID NO: 2054 - RNA, 19 nt, Influenza A virus
auuucuagcaugguggagg

SEQ ID NO: 2055 - RNA, 19 nt, Influenza A virus
uagcaugguggaggccaug

SEQ ID NO: 2056 - RNA, 19 nt, Influenza A virus
aaaucaaccugagugguuc

SEQ ID NO: 2057 - RNA, 19 nt, Influenza A virus
auugaacacgaugaccaaa

SEQ ID NO: 2058 - RNA, 19 nt, Influenza A virus
cuagcaugguggaggccau

SEQ ID NO: 2059 - RNA, 19 nt, Influenza A virus
accugagugguucagaaac

SEQ ID NO: 2060 - RNA, 19 nt, Influenza A virus
caaaagaaauacaccaaga

SEQ ID NO: 2061 - RNA, 19 nt, Influenza A virus
uuucuagcaugguggaggc

SEQ ID NO: 2062 - RNA, 19 nt, Influenza A virus
aggaaaaggauacauguuc

SEQ ID NO: 2063 - RNA, 19 nt, Influenza A virus
aaaagcuugaacagucugg

SEQ ID NO: 2064 - RNA, 19 nt, Influenza A virus
ggaauuucuagcauggugg

SEQ ID NO: 2065 - RNA, 19 nt, Influenza A virus
acaaaaaaucaaccugagu

SEQ ID NO: 2066 - RNA, 19 nt, Influenza A virus
aaaaaaucaaccugagugg

SEQ ID NO: 2067 - RNA, 19 nt, Influenza A virus
aagaaauacaccaagacaa

SEQ ID NO: 2068 - RNA, 19 nt, Influenza A virus
aacaaaauggcaagacuag

SEQ ID NO: 2069 - RNA, 19 nt, Influenza A virus
caaaaaaucaaccugagug

SEQ ID NO: 2070 - RNA, 19 nt, Influenza A virus
agaaauacaccaagacaac

SEQ ID NO: 2071 - RNA, 19 nt, Influenza A virus
aagaaaaaacaaagaguga

SEQ ID NO: 2072 - RNA, 19 nt, Influenza A virus
aaagcuugaacagucugga

SEQ ID NO: 2073 - RNA, 19 nt, Influenza A virus
uggaauuucuagcauggug

SEQ ID NO: 2074 - RNA, 19 nt, Influenza A virus
aauuucuagcaugguggag

SEQ ID NO: 2075 - RNA, 19 nt, Influenza A virus
gaaaagcuugaacagucug

SEQ ID NO: 2076 - RNA, 19 nt, Influenza A virus
gaauuucuagcauggugga

SEQ ID NO: 2077 - RNA, 19 nt, Influenza A virus
uucuagcaugguggaggcc

SEQ ID NO: 2078 - RNA, 19 nt, Influenza A virus
aaagacuacagauauacau

SEQ ID NO: 2079 - RNA, 19 nt, Influenza A virus
gggcaaaagaaauacacca

SEQ ID NO: 2080 - RNA, 19 nt, Influenza A virus
aauacaccaagacaacaua

SEQ ID NO: 2081 - RNA, 19 nt, Influenza A virus
aaagaaauacaccaagaca

SEQ ID NO: 2082 - RNA, 19 nt, Influenza A virus
uccuaaagguuccagcgca

SEQ ID NO: 2083 - RNA, 19 nt, Influenza A virus
uaagagaaugaagcuccga

SEQ ID NO: 2084 - RNA, 19 nt, Influenza A virus
aagagaaugaagcuccgaa

SEQ ID NO: 2085 - RNA, 19 nt, Influenza A virus
uuugcgaaaagcuugaaca

SEQ ID NO: 2086 - RNA, 19 nt, Influenza A virus
ccuaaagguuccagcgcaa

SEQ ID NO: 2087 - RNA, 19 nt, Influenza A virus
auuugcgaaaagcuugaac

SEQ ID NO: 2088 - RNA, 19 nt, Influenza A virus
agagaaugaagcuccgaac

SEQ ID NO: 2089 - RNA, 19 nt, Influenza A virus
uuccuaaagguuccagcgc

SEQ ID NO: 2090 - RNA, 19 nt, Influenza A virus
aagacuacagauauacaua

SEQ ID NO: 2091 - RNA, 19 nt, Influenza A virus
cacaaaaaaucaaccugag

SEQ ID NO: 2092 - RNA, 19 nt, Influenza A virus
aaauacaccaagacaacau

SEQ ID NO: 2093 - RNA, 19 nt, Influenza A virus
cauuugcgaaaagcuugaa

SEQ ID NO: 2094 - RNA, 19 nt, Influenza A virus
caaagacuacagauauaca

SEQ ID NO: 2095 - RNA, 19 nt, Influenza A virus
ccaauaauguucucaaaca

SEQ ID NO: 2096 - RNA, 19 nt, Influenza A virus
gagaaugaagcuccgaaca

SEQ ID NO: 2097 - RNA, 19 nt, Influenza A virus
gaaauacaccaagacaaca

SEQ ID NO: 2098 - RNA, 19 nt, Influenza A virus
aacaaacaaggguggacaa

SEQ ID NO: 2099 - RNA, 19 nt, Influenza A virus
aaacaaaauggcaagacua

SEQ ID NO: 2100 - RNA, 19 nt, Influenza A virus
ucuuugagaacucaugccu

SEQ ID NO: 2101 - RNA, 19 nt, Influenza A virus
uccuauauaaauaaaacag

SEQ ID NO: 2102 - RNA, 19 nt, Influenza A virus
ccuauauaaauaaaacagg

SEQ ID NO: 2103 - RNA, 19 nt, Influenza A virus
caauaauguucucaaacaa

SEQ ID NO: 2104 - RNA, 19 nt, Influenza A virus
uucgagaguaagagaauga

SEQ ID NO: 2105 - RNA, 19 nt, Influenza A virus
guucgagaguaagagaaug

SEQ ID NO: 2106 - RNA, 19 nt, Influenza A virus
ugggcaaaagaaauacacc

SEQ ID NO: 2107 - RNA, 19 nt, Influenza A virus
cuugggcaaaagaaauaca

SEQ ID NO: 2108 - RNA, 19 nt, Influenza A virus
ucgagaguaagagaaugaa

SEQ ID NO: 2109 - RNA, 19 nt, Influenza A virus
auguucgagaguaagagaa

SEQ ID NO: 2110 - RNA, 19 nt, Influenza A virus
aauaauguucucaaacaaa

SEQ ID NO: 2111 - RNA, 19 nt, Influenza A virus
uugggcaaaagaaauacac

SEQ ID NO: 2112 - RNA, 19 nt, Influenza A virus
uguucgagaguaagagaau

SEQ ID NO: 2113 - RNA, 19 nt, Influenza A virus
acaaacaaggguggacaaa

SEQ ID NO: 2114 - RNA, 19 nt, Influenza A virus
acucaugccuugaaacaau

SEQ ID NO: 2115 - RNA, 19 nt, Influenza A virus
gaaaaaggagaguaagaga

SEQ ID NO: 2116 - RNA, 19 nt, Influenza A virus
aaaaggagaguaagagaca

SEQ ID NO: 2117 - RNA, 19 nt, Influenza A virus
gaaucuugggcaaaagaaa

SEQ ID NO: 2118 - RNA, 19 nt, Influenza A virus
cuaggaaaaggauacaugu

SEQ ID NO: 2119 - RNA, 19 nt, Influenza A virus
agcauuugcgaaaagcuug

SEQ ID NO: 2120 - RNA, 19 nt, Influenza A virus
aucuuugagaacucaugcc

SEQ ID NO: 2121 - RNA, 19 nt, Influenza A virus
aaaggagaguaagagacaa

SEQ ID NO: 2122 - RNA, 19 nt, Influenza A virus
gcauuugcgaaaagcuuga

SEQ ID NO: 2123 - RNA, 19 nt, Influenza A virus
aucuugggcaaaagaaaua

SEQ ID NO: 2124 - RNA, 19 nt, Influenza A virus
gcgaaaagcuugaacaguc

SEQ ID NO: 2125 - RNA, 19 nt, Influenza A virus
uguucaucaaagacuacag

SEQ ID NO: 2126 - RNA, 19 nt, Influenza A virus
aaucuugggcaaaagaaau

SEQ ID NO: 2127 - RNA, 19 nt, Influenza A virus
aguuuuggagugucuggaa

SEQ ID NO: 2128 - RNA, 19 nt, Influenza A virus
gagcuuugacauugaacac

SEQ ID NO: 2129 - RNA, 19 nt, Influenza A virus
agaaaaaggagaguaagag

SEQ ID NO: 2130 - RNA, 19 nt, Influenza A virus
caauuguucaucaaagacu

SEQ ID NO: 2131 - RNA, 19 nt, Influenza A virus
aauuguucaucaaagacua

SEQ ID NO: 2132 - RNA, 19 nt, Influenza A virus
ucuugggcaaaagaaauac

SEQ ID NO: 2133 - RNA, 19 nt, Influenza A virus
aacucaugccuugaaacaa

SEQ ID NO: 2134 - RNA, 19 nt, Influenza A virus
agaaaaaacaaagagugaa

SEQ ID NO: 2135 - RNA, 19 nt, Influenza A virus
ugcgaaaagcuugaacagu

SEQ ID NO: 2136 - RNA, 19 nt, Influenza A virus
agacuacagauauacauau

SEQ ID NO: 2137 - RNA, 19 nt, Influenza A virus
uugcgaaaagcuugaacag

SEQ ID NO: 2138 - RNA, 19 nt, Influenza A virus
cgaaaagcuugaacagucu

SEQ ID NO: 2139 - RNA, 19 nt, Influenza A virus
aagaaaaaggagaguaaga

SEQ ID NO: 2140 - RNA, 19 nt, Influenza A virus
gagugaauaagagaggcua

SEQ ID NO: 2141 - RNA, 19 nt, Influenza A virus
ggcaaaagaaauacaccaa

SEQ ID NO: 2142 - RNA, 19 nt, Influenza A virus
cauguucgagaguaagaga

SEQ ID NO: 2143 - RNA, 19 nt, Influenza A virus
aaaaaacaaagagugaaua

SEQ ID NO: 2144 - RNA, 19 nt, Influenza A virus
agagugaauaagagaggcu

SEQ ID NO: 2145 - RNA, 19 nt, Influenza A virus
gaaaaaacaaagagugaau

SEQ ID NO: 2146 - RNA, 19 nt, Influenza A virus
cugugggaucaaacccaau

SEQ ID NO: 2147 - RNA, 19 nt, Influenza A virus
gggaaucaacaugagcaaa

SEQ ID NO: 2148 - RNA, 19 nt, Influenza A virus
guguccuggaggcuauggc

SEQ ID NO: 2149 - RNA, 19 nt, Influenza A virus
aaaaaggagaguaagagac

SEQ ID NO: 2150 - RNA, 19 nt, Influenza A virus
ucuguaaacaaugcuguag

SEQ ID NO: 2151 - RNA, 19 nt, Influenza A virus
gugggaucaaacccaauca

SEQ ID NO: 2152 - RNA, 19 nt, Influenza A virus
aagaucauucgagcuaaag

SEQ ID NO: 2153 - RNA, 19 nt, Influenza A virus
uguguccuggaggcuaugg

SEQ ID NO: 2154 - RNA, 19 nt, Influenza A virus
ugugggaucaaacccaauc

SEQ ID NO: 2155 - RNA, 19 nt, Influenza A virus
cuguaaacaaugcuguagu

SEQ ID NO: 2156 - RNA, 19 nt, Influenza A virus
gaacucaugccuugaaaca

SEQ ID NO: 2157 - RNA, 19 nt, Influenza A virus
guuuuggagugucuggaau

SEQ ID NO: 2158 - RNA, 19 nt, Influenza A virus
caugagcaaaaagaagucc

SEQ ID NO: 2159 - RNA, 19 nt, Influenza A virus
ggaugaugaugggcauguu

SEQ ID NO: 2160 - RNA, 19 nt, Influenza A virus
aacaaagagugaauaagag

SEQ ID NO: 2161 - RNA, 19 nt, Influenza A virus
acaaagagugaauaagaga

SEQ ID NO: 2162 - RNA, 19 nt, Influenza A virus
aaacaaagagugaauaaga

SEQ ID NO: 2163 - RNA, 19 nt, Influenza A virus
gggaugaugaugggcaugu

SEQ ID NO: 2164 - RNA, 19 nt, Influenza A virus
aaaaggauacauguucgag

SEQ ID NO: 2165 - RNA, 19 nt, Influenza A virus
acuaggaaaaggauacaug

SEQ ID NO: 2166 - RNA, 19 nt, Influenza A virus
cuuugagaacucaugccuu

SEQ ID NO: 2167 - RNA, 19 nt, Influenza A virus
agacuguguccuggaggcu

SEQ ID NO: 2168 - RNA, 19 nt, Influenza A virus
gacuaggaaaaggauacau

SEQ ID NO: 2169 - RNA, 19 nt, Influenza A virus
cccaacucaacccaauuga

SEQ ID NO: 2170 - RNA, 19 nt, Influenza A virus
aaaaacaaagagugaauaa

SEQ ID NO: 2171 - RNA, 19 nt, Influenza A virus
uuguucgagaaauuuuucc

SEQ ID NO: 2172 - RNA, 19 nt, Influenza A virus
aguccuauauaaauaaaac

SEQ ID NO: 2173 - RNA, 19 nt, Influenza A virus
aacuuguucgagaaauuuu

SEQ ID NO: 2174 - RNA, 19 nt, Influenza A virus
ccccaacucaacccaauug

SEQ ID NO: 2175 - RNA, 19 nt, Influenza A virus
aaguccuauauaaauaaaa

SEQ ID NO: 2176 - RNA, 19 nt, Influenza A virus
acuguguccuggaggcuau

SEQ ID NO: 2177 - RNA, 19 nt, Influenza A virus
cuguguccuggaggcuaug

SEQ ID NO: 2178 - RNA, 19 nt, Influenza A virus
aacacuaaguggaaugaaa

SEQ ID NO: 2179 - RNA, 19 nt, Influenza A virus
aggagaguaagagacaaca

SEQ ID NO: 2180 - RNA, 19 nt, Influenza A virus
ugcaacuuguucgagaaau

SEQ ID NO: 2181 - RNA, 19 nt, Influenza A virus
acacuaaguggaaugaaaa

SEQ ID NO: 2182 - RNA, 19 nt, Influenza A virus
ugcugcaacuuguucgaga

SEQ ID NO: 2183 - RNA, 19 nt, Influenza A virus
gcugugggaucaaacccaa

SEQ ID NO: 2184 - RNA, 19 nt, Influenza A virus
ccaacucaacccaauugau

SEQ ID NO: 2185 - RNA, 19 nt, Influenza A virus
gacuguguccuggaggcua

SEQ ID NO: 2186 - RNA, 19 nt, Influenza A virus
acuuguucgagaaauuuuu

SEQ ID NO: 2187 - RNA, 19 nt, Influenza A virus
aaggagaguaagagacaac

SEQ ID NO: 2188 - RNA, 19 nt, Influenza A virus
agacuaggaaaaggauaca

SEQ ID NO: 2189 - RNA, 19 nt, Influenza A virus
gcaacuuguucgagaaauu

SEQ ID NO: 2190 - RNA, 19 nt, Influenza A virus
ggagaguaagagacaacau

SEQ ID NO: 2191 - RNA, 19 nt, Influenza A virus
guccuauauaaauaaaaca

SEQ ID NO: 2192 - RNA, 19 nt, Influenza A virus
cuaauaagagcuuugacau

SEQ ID NO: 2193 - RNA, 19 nt, Influenza A virus
caacuuguucgagaaauuu

SEQ ID NO: 2194 - RNA, 19 nt, Influenza A virus
aaaauggcaagacuaggaa

SEQ ID NO: 2195 - RNA, 19 nt, Influenza A virus
cuggacggauuaagaagga

SEQ ID NO: 2196 - RNA, 19 nt, Influenza A virus
gaaguccuauauaaauaaa

SEQ ID NO: 2197 - RNA, 19 nt, Influenza A virus
uaauaagagcuuugacauu

SEQ ID NO: 2198 - RNA, 19 nt, Influenza A virus
caaagagugaauaagagag

SEQ ID NO: 2199 - RNA, 19 nt, Influenza A virus
cuuguucgagaaauuuuuc

SEQ ID NO: 2200 - RNA, 19 nt, Influenza A virus
gcugcaacuuguucgagaa

SEQ ID NO: 2201 - RNA, 19 nt, Influenza A virus
ucaugccuugaaacaaugg

SEQ ID NO: 2202 - RNA, 19 nt, Influenza A virus
caugccuugaaacaaugga

SEQ ID NO: 2203 - RNA, 19 nt, Influenza A virus
aaauggcaagacuaggaaa

SEQ ID NO: 2204 - RNA, 19 nt, Influenza A virus
caaaauggcaagacuagga

SEQ ID NO: 2205 - RNA, 19 nt, Influenza A virus
ucuggacggauuaagaagg

SEQ ID NO: 2206 - RNA, 19 nt, Influenza A virus
aaagagugaauaagagagg

SEQ ID NO: 2207 - RNA, 19 nt, Influenza A virus
acaggaacaggguacacca

SEQ ID NO: 2208 - RNA, 19 nt, Influenza A virus
cacuuucaaagaaaaagga

SEQ ID NO: 2209 - RNA, 19 nt, Influenza A virus
caacacuaaguggaaugaa

SEQ ID NO: 2210 - RNA, 19 nt, Influenza A virus
gacaacacuaaguggaaug

SEQ ID NO: 2211 - RNA, 19 nt, Influenza A virus
acaacacuaaguggaauga

SEQ ID NO: 2212 - RNA, 19 nt, Influenza A virus
uggacggauuaagaaggaa

SEQ ID NO: 2213 - RNA, 19 nt, Influenza A virus
acacuuucaaagaaaaagg

SEQ ID NO: 2214 - RNA, 19 nt, Influenza A virus
aaaacaaagagugaauaag

SEQ ID NO: 2215 - RNA, 19 nt, Influenza A virus
caggaacaggguacaccau

SEQ ID NO: 2216 - RNA, 19 nt, Influenza A virus
uauggaauaugaugccguu

SEQ ID NO: 2217 - RNA, 19 nt, Influenza A virus
acuuucaaagaaaaaggag

SEQ ID NO: 2218 - RNA, 19 nt, Influenza A virus
gagucagcugauaugagca

SEQ ID NO: 2219 - RNA, 19 nt, Influenza A virus
agagcuuugacauugaaca

SEQ ID NO: 2220 - RNA, 19 nt, Influenza A virus
auaagagcuuugacauuga

SEQ ID NO: 2221 - RNA, 19 nt, Influenza A virus
ggacggauuaagaaggaag

SEQ ID NO: 2222 - RNA, 19 nt, Influenza A virus
gagaguaagagacaacaug

SEQ ID NO: 2223 - RNA, 19 nt, Influenza A virus
aagagcuuugacauugaac

SEQ ID NO: 2224 - RNA, 19 nt, Influenza A virus
gucuggacggauuaagaag

SEQ ID NO: 2225 - RNA, 19 nt, Influenza A virus
gaugggcuccaauccuccg

SEQ ID NO: 2226 - RNA, 19 nt, Influenza A virus
aagcugugggaucaaaccc

SEQ ID NO: 2227 - RNA, 19 nt, Influenza A virus
uaagagcuuugacauugaa

SEQ ID NO: 2228 - RNA, 19 nt, Influenza A virus
cuuucaaagaaaaaggaga

SEQ ID NO: 2229 - RNA, 19 nt, Influenza A virus
augggcuccaauccuccga

SEQ ID NO: 2230 - RNA, 19 nt, Influenza A virus
ggaugggcuccaauccucc

SEQ ID NO: 2231 - RNA, 19 nt, Influenza A virus
gacggauuaagaaggaaga

SEQ ID NO: 2232 - RNA, 19 nt, Influenza A virus
agucagcugauaugagcau

SEQ ID NO: 2233 - RNA, 19 nt, Influenza A virus
acaaauacagaaacugggg

SEQ ID NO: 2234 - RNA, 19 nt, Influenza A virus
ggaacaggguacaccaugg

SEQ ID NO: 2235 - RNA, 19 nt, Influenza A virus
agcugugggaucaaaccca

SEQ ID NO: 2236 - RNA, 19 nt, Influenza A virus
caaauacagaaacuggggc

SEQ ID NO: 2237 - RNA, 19 nt, Influenza A virus
gucagcugauaugagcauu

SEQ ID NO: 2238 - RNA, 19 nt, Influenza A virus
cugcaacuuguucgagaaa

SEQ ID NO: 2239 - RNA, 19 nt, Influenza A virus
gaacaggguacaccaugga

SEQ ID NO: 2240 - RNA, 19 nt, Influenza A virus
aagagugaauaagagaggc

SEQ ID NO: 2241 - RNA, 19 nt, Influenza A virus
agugcugcaacuuguucga

SEQ ID NO: 2242 - RNA, 19 nt, Influenza A virus
cuuucacaaucacugggga

SEQ ID NO: 2243 - RNA, 19 nt, Influenza A virus
cucaugccuugaaacaaug

SEQ ID NO: 2244 - RNA, 19 nt, Influenza A virus
ucuuucacaaucacugggg

SEQ ID NO: 2245 - RNA, 19 nt, Influenza A virus
aagugcugcaacuuguucg

SEQ ID NO: 2246 - RNA, 19 nt, Influenza A virus
aggaacaggguacaccaug

SEQ ID NO: 2247 - RNA, 19 nt, Influenza A virus
augccuugaaacaauggaa

SEQ ID NO: 2248 - RNA, 19 nt, Influenza A virus
aauaagagcuuugacauug

SEQ ID NO: 2249 - RNA, 19 nt, Influenza A virus
caguuuuggagugucugga

SEQ ID NO: 2250 - RNA, 19 nt, Influenza A virus
aaagaaggccaaacuggca

SEQ ID NO: 2251 - RNA, 19 nt, Influenza A virus
aucaaagacuacagauaua

SEQ ID NO: 2252 - RNA, 19 nt, Influenza A virus
ccuuugucagccauaaaga

SEQ ID NO: 2253 - RNA, 19 nt, Influenza A virus
guauggaauaugaugccgu

SEQ ID NO: 2254 - RNA, 19 nt, Influenza A virus
uuggcgaugauuacauaua

SEQ ID NO: 2255 - RNA, 19 nt, Influenza A virus
gaaaagaaggccaaacugg

SEQ ID NO: 2256 - RNA, 19 nt, Influenza A virus
caucaaagacuacagauau

SEQ ID NO: 2257 - RNA, 19 nt, Influenza A virus
cccuuugucagccauaaag

SEQ ID NO: 2258 - RNA, 19 nt, Influenza A virus
uuguucaucaaagacuaca

SEQ ID NO: 2259 - RNA, 19 nt, Influenza A virus
aaaagaaggccaaacuggc

SEQ ID NO: 2260 - RNA, 19 nt, Influenza A virus
gcccaugguccagccaaaa

SEQ ID NO: 2261 - RNA, 19 nt, Influenza A virus
acaacauacuggugggaug

SEQ ID NO: 2262 - RNA, 19 nt, Influenza A virus
gugcugcaacuuguucgag

SEQ ID NO: 2263 - RNA, 19 nt, Influenza A virus
aguauggaauaugaugccg

SEQ ID NO: 2264 - RNA, 19 nt, Influenza A virus
caacauacuggugggaugg

SEQ ID NO: 2265 - RNA, 19 nt, Influenza A virus
aaucccuuugucagccaua

SEQ ID NO: 2266 - RNA, 19 nt, Influenza A virus
ucccuuugucagccauaaa

SEQ ID NO: 2267 - RNA, 19 nt, Influenza A virus
auuguucaucaaagacuac

SEQ ID NO: 2268 - RNA, 19 nt, Influenza A virus
aucccuuugucagccauaa

SEQ ID NO: 2269 - RNA, 19 nt, Influenza A virus
uggcaagacuaggaaaagg

SEQ ID NO: 2270 - RNA, 19 nt, Influenza A virus
uucuuucacaaucacuggg

SEQ ID NO: 2271 - RNA, 19 nt, Influenza A virus
aauggcaagacuaggaaaa

SEQ ID NO: 2272 - RNA, 19 nt, Influenza A virus
uuucacaaucacuggggac

SEQ ID NO: 2273 - RNA, 19 nt, Influenza A virus
ucgcaccaauaauguucuc

SEQ ID NO: 2274 - RNA, 19 nt, Influenza A virus
gcaccaauaauguucucaa

SEQ ID NO: 2275 - RNA, 19 nt, Influenza A virus
accaauaauguucucaaac

SEQ ID NO: 2276 - RNA, 19 nt, Influenza A virus
uucacaaucacuggggaca

SEQ ID NO: 2277 - RNA, 19 nt, Influenza A virus
ucacaaucacuggggacaa

SEQ ID NO: 2278 - RNA, 19 nt, Influenza A virus
caccaauaauguucucaaa

SEQ ID NO: 2279 - RNA, 19 nt, Influenza A virus
auggcaagacuaggaaaag

SEQ ID NO: 2280 - RNA, 19 nt, Influenza A virus
acuuaugauuggacauuaa

SEQ ID NO: 2281 - RNA, 19 nt, Influenza A virus
gcuuugacauugaacacga

SEQ ID NO: 2282 - RNA, 19 nt, Influenza A virus
gaagucguucaacaaacaa

SEQ ID NO: 2283 - RNA, 19 nt, Influenza A virus
agcuuugacauugaacacg

SEQ ID NO: 2284 - RNA, 19 nt, Influenza A virus
aagucguucaacaaacaag

SEQ ID NO: 2285 - RNA, 19 nt, Influenza A virus
uagcuagaagcauuugcga

SEQ ID NO: 2286 - RNA, 19 nt, Influenza A virus
uuugacauugaacacgaug

SEQ ID NO: 2287 - RNA, 19 nt, Influenza A virus
cuuugacauugaacacgau

SEQ ID NO: 2288 - RNA, 19 nt, Influenza A virus
aucgcaccaauaauguucu

SEQ ID NO: 2289 - RNA, 19 nt, Influenza A virus
cuuuagcuagaagcauuug

SEQ ID NO: 2290 - RNA, 19 nt, Influenza A virus
cuuaugauuggacauuaaa

SEQ ID NO: 2291 - RNA, 19 nt, Influenza A virus
gaacacaaauacccgcaga

SEQ ID NO: 2292 - RNA, 19 nt, Influenza A virus
agcaucgcaccaauaaugu

SEQ ID NO: 2293 - RNA, 19 nt, Influenza A virus
gcaucgcaccaauaauguu

SEQ ID NO: 2294 - RNA, 19 nt, Influenza A virus
uucagacgagaagaucauu

SEQ ID NO: 2295 - RNA, 19 nt, Influenza A virus
ugagcaucgcaccaauaau

SEQ ID NO: 2296 - RNA, 19 nt, Influenza A virus
cgcaccaauaauguucuca

SEQ ID NO: 2297 - RNA, 19 nt, Influenza A virus
uuagcuagaagcauuugcg

SEQ ID NO: 2298 - RNA, 19 nt, Influenza A virus
caucgcaccaauaauguuc

SEQ ID NO: 2299 - RNA, 19 nt, Influenza A virus
gagcaucgcaccaauaaug

SEQ ID NO: 2300 - RNA, 19 nt, Influenza A virus
ucucgauacugaaucuugg

SEQ ID NO: 2301 - RNA, 19 nt, Influenza A virus
agacgagaagaucauucga

SEQ ID NO: 2302 - RNA, 19 nt, Influenza A virus
gguaaugaaaagaaggcca

SEQ ID NO: 2303 - RNA, 19 nt, Influenza A virus
cagacgagaagaucauucg

SEQ ID NO: 2304 - RNA, 19 nt, Influenza A virus
gucucgauacugaaucuug

SEQ ID NO: 2305 - RNA, 19 nt, Influenza A virus
uuuagcuagaagcauuugc

SEQ ID NO: 2306 - RNA, 19 nt, Influenza A virus
guaaugaaaagaaggccaa

SEQ ID NO: 2307 - RNA, 19 nt, Influenza A virus
acuuuagcuagaagcauuu

SEQ ID NO: 2308 - RNA, 19 nt, Influenza A virus
agcccaugguccagccaaa

SEQ ID NO: 2309 - RNA, 19 nt, Influenza A virus
uaaugaaaagaaggccaaa

SEQ ID NO: 2310 - RNA, 19 nt, Influenza A virus
gagucucgauacugaaucu

SEQ ID NO: 2311 - RNA, 19 nt, Influenza A virus
ucagacgagaagaucauuc

SEQ ID NO: 2312 - RNA, 19 nt, Influenza A virus
ucguucaacaaacaagggu

SEQ ID NO: 2313 - RNA, 19 nt, Influenza A virus
auucagacgagaagaucau

SEQ ID NO: 2314 - RNA, 19 nt, Influenza A virus
ugccauagaggagacacac

SEQ ID NO: 2315 - RNA, 19 nt, Influenza A virus
cccaugguccagccaaaag

SEQ ID NO: 2316 - RNA, 19 nt, Influenza A virus
ggagucucgauacugaauc

SEQ ID NO: 2317 - RNA, 19 nt, Influenza A virus
ugaccaaagaugcagagag

SEQ ID NO: 2318 - RNA, 19 nt, Influenza A virus
cacaaauucagacgagaag

SEQ ID NO: 2319 - RNA, 19 nt, Influenza A virus
cugagcaucgcaccaauaa

SEQ ID NO: 2320 - RNA, 19 nt, Influenza A virus
ccaaagaugcagagagagg

SEQ ID NO: 2321 - RNA, 19 nt, Influenza A virus
agucucgauacugaaucuu

SEQ ID NO: 2322 - RNA, 19 nt, Influenza A virus
caacaaggaagaaaauuga

SEQ ID NO: 2323 - RNA, 19 nt, Influenza A virus
gcaccccaacucaacccaa

SEQ ID NO: 2324 - RNA, 19 nt, Influenza A virus
gccauagaggagacacaca

SEQ ID NO: 2325 - RNA, 19 nt, Influenza A virus
ggcaccccaacucaaccca

SEQ ID NO: 2326 - RNA, 19 nt, Influenza A virus
uauacauauaggugccaua

SEQ ID NO: 2327 - RNA, 19 nt, Influenza A virus
augaccaaagaugcagaga

SEQ ID NO: 2328 - RNA, 19 nt, Influenza A virus
guugaaacuuuagcuagaa

SEQ ID NO: 2329 - RNA, 19 nt, Influenza A virus
auacauauaggugccauag

SEQ ID NO: 2330 - RNA, 19 nt, Influenza A virus
gucguucaacaaacaaggg

SEQ ID NO: 2331 - RNA, 19 nt, Influenza A virus
acaaauucagacgagaaga

SEQ ID NO: 2332 - RNA, 19 nt, Influenza A virus
acaaggaagaaaauugaga

SEQ ID NO: 2333 - RNA, 19 nt, Influenza A virus
uccugagcaucgcaccaau

SEQ ID NO: 2334 - RNA, 19 nt, Influenza A virus
auccugagcaucgcaccaa

SEQ ID NO: 2335 - RNA, 19 nt, Influenza A virus
ggggacaacacuaagugga

SEQ ID NO: 2336 - RNA, 19 nt, Influenza A virus
auagaggagacacacaaau

SEQ ID NO: 2337 - RNA, 19 nt, Influenza A virus
gggacaacacuaaguggaa

SEQ ID NO: 2338 - RNA, 19 nt, Influenza A virus
ccauagaggagacacacaa

SEQ ID NO: 2339 - RNA, 19 nt, Influenza A virus
accaaagaugcagagagag

SEQ ID NO: 2340 - RNA, 19 nt, Influenza A virus
acacaaauucagacgagaa

SEQ ID NO: 2341 - RNA, 19 nt, Influenza A virus
ucaacaaggaagaaaauug

SEQ ID NO: 2342 - RNA, 19 nt, Influenza A virus
gacgagaagaucauucgag

SEQ ID NO: 2343 - RNA, 19 nt, Influenza A virus
guucaucaaagacuacaga

SEQ ID NO: 2344 - RNA, 19 nt, Influenza A virus
aaauucagacgagaagauc

SEQ ID NO: 2345 - RNA, 19 nt, Influenza A virus
cauagaggagacacacaaa

SEQ ID NO: 2346 - RNA, 19 nt, Influenza A virus
caaauucagacgagaagau

SEQ ID NO: 2347 - RNA, 19 nt, Influenza A virus
ggacaacacuaaguggaau

SEQ ID NO: 2348 - RNA, 19 nt, Influenza A virus
aauucagacgagaagauca

SEQ ID NO: 2349 - RNA, 19 nt, Influenza A virus
gaccaaagaugcagagaga

SEQ ID NO: 2350 - RNA, 19 nt, Influenza A virus
aacuuuagcuagaagcauu

SEQ ID NO: 2351 - RNA, 19 nt, Influenza A virus
augaaaagaaggccaaacu

SEQ ID NO: 2352 - RNA, 19 nt, Influenza A virus
caccccaacucaacccaau

SEQ ID NO: 2353 - RNA, 19 nt, Influenza A virus
uacugaaucuugggcaaaa

SEQ ID NO: 2354 - RNA, 19 nt, Influenza A virus
accccaacucaacccaauu

SEQ ID NO: 2355 - RNA, 19 nt, Influenza A virus
aaugaaaagaaggccaaac

SEQ ID NO: 2356 - RNA, 19 nt, Influenza A virus
ugaaacuuuagcuagaagc

SEQ ID NO: 2357 - RNA, 19 nt, Influenza A virus
uugaaacuuuagcuagaag

SEQ ID NO: 2358 - RNA, 19 nt, Influenza A virus
aacaaggaagaaaauugag

SEQ ID NO: 2359 - RNA, 19 nt, Influenza A virus
gaaacuuuagcuagaagca

SEQ ID NO: 2360 - RNA, 19 nt, Influenza A virus
uagaggagacacacaaauu

SEQ ID NO: 2361 - RNA, 19 nt, Influenza A virus
aaacuuuagcuagaagcau

SEQ ID NO: 2362 - RNA, 19 nt, Influenza A virus
ccugagcaucgcaccaaua

SEQ ID NO: 2363 - RNA, 19 nt, Influenza A virus
aucaacaaggaagaaaauu

SEQ ID NO: 2364 - RNA, 19 nt, Influenza A virus
auacugaaucuugggcaaa

SEQ ID NO: 2365 - RNA, 19 nt, Influenza A virus
cgaacacaaauacccgcag

SEQ ID NO: 2366 - RNA, 19 nt, Influenza A virus
aaucaacaaggaagaaaau

SEQ ID NO: 2367 - RNA, 19 nt, Influenza A virus
acaaauacccgcagaaaug

SEQ ID NO: 2368 - RNA, 19 nt, Influenza A virus
agaagcugugggaucaaac

SEQ ID NO: 2369 - RNA, 19 nt, Influenza A virus
acugaaucuugggcaaaag

SEQ ID NO: 2370 - RNA, 19 nt, Influenza A virus
acacaaauacccgcagaaa

SEQ ID NO: 2371 - RNA, 19 nt, Influenza A virus
gaaucaacaaggaagaaaa

SEQ ID NO: 2372 - RNA, 19 nt, Influenza A virus
aagaagcugugggaucaaa

SEQ ID NO: 2373 - RNA, 19 nt, Influenza A virus
cacaaauacccgcagaaau

SEQ ID NO: 2374 - RNA, 19 nt, Influenza A virus
ugaaaagaaggccaaacug

SEQ ID NO: 2375 - RNA, 19 nt, Influenza A virus
uaaagaagcugugggauca

SEQ ID NO: 2376 - RNA, 19 nt, Influenza A virus
aaagaagcugugggaucaa

SEQ ID NO: 2377 - RNA, 19 nt, Influenza A virus
cacacaaauucagacgaga

SEQ ID NO: 2378 - RNA, 19 nt, Influenza A virus
caaauacccgcagaaaugc

SEQ ID NO: 2379 - RNA, 19 nt, Influenza A virus
uuggagugucuggaauaaa

SEQ ID NO: 2380 - RNA, 19 nt, Influenza A virus
uauuucaaugaaucaacaa

SEQ ID NO: 2381 - RNA, 19 nt, Influenza A virus
uuuggagugucuggaauaa

SEQ ID NO: 2382 - RNA, 19 nt, Influenza A virus
aaauacccgcagaaaugcu

SEQ ID NO: 2383 - RNA, 19 nt, Influenza A virus
aacacaaauacccgcagaa

SEQ ID NO: 2384 - RNA, 19 nt, Influenza A virus
cauccugagcaucgcacca

SEQ ID NO: 2385 - RNA, 19 nt, Influenza A virus
aaauacagaaacuggggca

SEQ ID NO: 2386 - RNA, 19 nt, Influenza A virus
cugcauuagccaacaccau

SEQ ID NO: 2387 - RNA, 19 nt, Influenza A virus
acugcauuagccaacacca

SEQ ID NO: 2388 - RNA, 19 nt, Influenza A virus
aauacagaaacuggggcac

SEQ ID NO: 2389 - RNA, 19 nt, Influenza A virus
agucguucaacaaacaagg

SEQ ID NO: 2390 - RNA, 19 nt, Influenza A virus
uuagagccuauguggaugg

SEQ ID NO: 2391 - RNA, 19 nt, Influenza A virus
uuuagagccuauguggaug

SEQ ID NO: 2392 - RNA, 19 nt, Influenza A virus
agcaauugaggagugccug

SEQ ID NO: 2393 - RNA, 19 nt, Influenza A virus
uugaggagugccugauuaa

SEQ ID NO: 2394 - RNA, 19 nt, Influenza A virus
gcaauugaggagugccuga

SEQ ID NO: 2395 - RNA, 19 nt, Influenza A virus
auugaggagugccugauua

SEQ ID NO: 2396 - RNA, 19 nt, Influenza A virus
caauugaggagugccugau

SEQ ID NO: 2397 - RNA, 19 nt, Influenza A virus
aauugaggagugccugauu

SEQ ID NO: 2398 - RNA, 19 nt, Influenza A virus
uagagccuauguggaugga

SEQ ID NO: 2399 - RNA, 19 nt, Influenza A virus
agagccuauguggauggau

SEQ ID NO: 2400 - RNA, 19 nt, Influenza A virus
gagccuauguggauggauu

SEQ ID NO: 2401 - RNA, 19 nt, Influenza A virus
uaaugaucccuggguuuug

SEQ ID NO: 2402 - RNA, 19 nt, Influenza A virus
uuaaugaucccuggguuuu

SEQ ID NO: 2403 - RNA, 19 nt, Influenza A virus
augaucccuggguuuugcu

SEQ ID NO: 2404 - RNA, 19 nt, Influenza A virus
aaugaucccuggguuuugc

SEQ ID NO: 2405 - RNA, 19 nt, Influenza A virus
ccugauuaaugaucccugg

SEQ ID NO: 2406 - RNA, 19 nt, Influenza A virus
ugccugauuaaugaucccu

SEQ ID NO: 2407 - RNA, 19 nt, Influenza A virus
auuaaugaucccuggguuu

SEQ ID NO: 2408 - RNA, 19 nt, Influenza A virus
gccugauuaaugaucccug

SEQ ID NO: 2409 - RNA, 19 nt, Influenza A virus
cugauuaaugaucccuggg

SEQ ID NO: 2410 - RNA, 19 nt, Influenza A virus
gauuaaugaucccuggguu

SEQ ID NO: 2411 - RNA, 19 nt, Influenza A virus
ugauuaaugaucccugggu

SEQ ID NO: 2412 - RNA, 19 nt, Influenza A virus
uauaugaagcaauugagga

SEQ ID NO: 2413 - RNA, 19 nt, Influenza A virus
cuauaugaagcaauugagg

SEQ ID NO: 2414 - RNA, 19 nt, Influenza A virus
cuugguucaacuccuuccu

SEQ ID NO: 2415 - RNA, 19 nt, Influenza A virus
ucuugguucaacuccuucc

SEQ ID NO: 2416 - RNA, 19 nt, Influenza A virus
aggagugccugauuaauga

SEQ ID NO: 2417 - RNA, 19 nt, Influenza A virus
gagugccugauuaaugauc

SEQ ID NO: 2418 - RNA, 19 nt, Influenza A virus
ugaggagugccugauuaau

SEQ ID NO: 2419 - RNA, 19 nt, Influenza A virus
gugccugauuaaugauccc

SEQ ID NO: 2420 - RNA, 19 nt, Influenza A virus
ggagugccugauuaaugau

SEQ ID NO: 2421 - RNA, 19 nt, Influenza A virus
gaggagugccugauuaaug

SEQ ID NO: 2422 - RNA, 19 nt, Influenza A virus
agugccugauuaaugaucc

SEQ ID NO: 2423 - RNA, 19 nt, Influenza A virus
uaugaagcaauugaggagu

SEQ ID NO: 2424 - RNA, 19 nt, Influenza A virus
auaugaagcaauugaggag

SEQ ID NO: 2425 - RNA, 19 nt, Influenza A virus
augaagcaauugaggagug

SEQ ID NO: 2426 - RNA, 19 nt, Influenza A virus
ugaagcaauugaggagugc

SEQ ID NO: 2427 - RNA, 19 nt, Influenza A virus
aagcaauugaggagugccu

SEQ ID NO: 2428 - RNA, 19 nt, Influenza A virus
gaagcaauugaggagugcc

SEQ ID NO: 2429 - RNA, 19 nt, Influenza A virus
acaaauuugcagcaauaug

SEQ ID NO: 2430 - RNA, 19 nt, Influenza A virus
aacaaauuugcagcaauau

SEQ ID NO: 2431 - RNA, 19 nt, Influenza A virus
gggcuauaugaagcaauug

SEQ ID NO: 2432 - RNA, 19 nt, Influenza A virus
gcuauaugaagcaauugag

SEQ ID NO: 2433 - RNA, 19 nt, Influenza A virus
ucauguauucagauuuuca

SEQ ID NO: 2434 - RNA, 19 nt, Influenza A virus
ggcuauaugaagcaauuga

SEQ ID NO: 2435 - RNA, 19 nt, Influenza A virus
caaauuugcagcaauaugc

SEQ ID NO: 2436 - RNA, 19 nt, Influenza A virus
aaauuugcagcaauaugca

SEQ ID NO: 2437 - RNA, 19 nt, Influenza A virus
uucauguauucagauuuuc

SEQ ID NO: 2438 - RNA, 19 nt, Influenza A virus
aauuugcagcaauaugcac

SEQ ID NO: 2439 - RNA, 19 nt, Influenza A virus
acaaacaaauuugcagcaa

SEQ ID NO: 2440 - RNA, 19 nt, Influenza A virus
caaacaaauuugcagcaau

SEQ ID NO: 2441 - RNA, 19 nt, Influenza A virus
aaacaaauuugcagcaaua

SEQ ID NO: 2442 - RNA, 19 nt, Influenza A virus
uuuuagagccuauguggau

SEQ ID NO: 2443 - RNA, 19 nt, Influenza A virus
aauuuuagagccuaugugg

SEQ ID NO: 2444 - RNA, 19 nt, Influenza A virus
auuuuagagccuaugugga

SEQ ID NO: 2445 - RNA, 19 nt, Influenza A virus
guauucagauuuucauuuc

SEQ ID NO: 2446 - RNA, 19 nt, Influenza A virus
gcauccugugcagcaaugg

SEQ ID NO: 2447 - RNA, 19 nt, Influenza A virus
augcauccugugcagcaau

SEQ ID NO: 2448 - RNA, 19 nt, Influenza A virus
uauucagauuuucauuuca

SEQ ID NO: 2449 - RNA, 19 nt, Influenza A virus
gaaacaaacaaauuugcag

SEQ ID NO: 2450 - RNA, 19 nt, Influenza A virus
uguauucagauuuucauuu

SEQ ID NO: 2451 - RNA, 19 nt, Influenza A virus
aaugcauccugugcagcaa

SEQ ID NO: 2452 - RNA, 19 nt, Influenza A virus
aacaaacaaauuugcagca

SEQ ID NO: 2453 - RNA, 19 nt, Influenza A virus
aaacaaacaaauuugcagc

SEQ ID NO: 2454 - RNA, 19 nt, Influenza A virus
cauccugugcagcaaugga

SEQ ID NO: 2455 - RNA, 19 nt, Influenza A virus
auucagauuuucauuucau

SEQ ID NO: 2456 - RNA, 19 nt, Influenza A virus
auguauucagauuuucauu

SEQ ID NO: 2457 - RNA, 19 nt, Influenza A virus
ugcauccugugcagcaaug

SEQ ID NO: 2458 - RNA, 19 nt, Influenza A virus
cauguauucagauuuucau

SEQ ID NO: 2459 - RNA, 19 nt, Influenza A virus
agaauuuuagagccuaugu

SEQ ID NO: 2460 - RNA, 19 nt, Influenza A virus
gagaauuuuagagccuaug

SEQ ID NO: 2461 - RNA, 19 nt, Influenza A virus
gauuuucauuucaucaaug

SEQ ID NO: 2462 - RNA, 19 nt, Influenza A virus
ugagaauuuuagagccuau

SEQ ID NO: 2463 - RNA, 19 nt, Influenza A virus
uugagaauuuuagagccua

SEQ ID NO: 2464 - RNA, 19 nt, Influenza A virus
auuuucauuucaucaauga

SEQ ID NO: 2465 - RNA, 19 nt, Influenza A virus
ucagauuuucauuucauca

SEQ ID NO: 2466 - RNA, 19 nt, Influenza A virus
gaauuuuagagccuaugug

SEQ ID NO: 2467 - RNA, 19 nt, Influenza A virus
cagauuuucauuucaucaa

SEQ ID NO: 2468 - RNA, 19 nt, Influenza A virus
guucaggcucuuagggaca

SEQ ID NO: 2469 - RNA, 19 nt, Influenza A virus
uucaggcucuuagggacaa

SEQ ID NO: 2470 - RNA, 19 nt, Influenza A virus
agauuuucauuucaucaau

SEQ ID NO: 2471 - RNA, 19 nt, Influenza A virus
uucagauuuucauuucauc

SEQ ID NO: 2472 - RNA, 19 nt, Influenza A virus
agaggcgaagaaacaauug

SEQ ID NO: 2473 - RNA, 19 nt, Influenza A virus
gaggcgaagaaacaauuga

SEQ ID NO: 2474 - RNA, 19 nt, Influenza A virus
ggcgaagaaacaauugaag

SEQ ID NO: 2475 - RNA, 19 nt, Influenza A virus
cgaagaaacaauugaagaa

SEQ ID NO: 2476 - RNA, 19 nt, Influenza A virus
gcgaagaaacaauugaaga

SEQ ID NO: 2477 - RNA, 19 nt, Influenza A virus
aggcgaagaaacaauugaa

SEQ ID NO: 2478 - RNA, 19 nt, Influenza A virus
gaagaaacaauugaagaaa

SEQ ID NO: 2479 - RNA, 19 nt, Influenza A virus
aaaugaaauggggaaugga

SEQ ID NO: 2480 - RNA, 19 nt, Influenza A virus
aaaaugaaauggggaaugg

SEQ ID NO: 2481 - RNA, 19 nt, Influenza A virus
ugaaauggggaauggagau

SEQ ID NO: 2482 - RNA, 19 nt, Influenza A virus
aauggggaauggagaugag

SEQ ID NO: 2483 - RNA, 19 nt, Influenza A virus
cacauuuucucauucacug

SEQ ID NO: 2484 - RNA, 19 nt, Influenza A virus
aaauggggaauggagauga

SEQ ID NO: 2485 - RNA, 19 nt, Influenza A virus
gaaauggggaauggagaug

SEQ ID NO: 2486 - RNA, 19 nt, Influenza A virus
augaaauggggaauggaga

SEQ ID NO: 2487 - RNA, 19 nt, Influenza A virus
acauuuucucauucacugg

SEQ ID NO: 2488 - RNA, 19 nt, Influenza A virus
aaagaggcgaagaaacaau

SEQ ID NO: 2489 - RNA, 19 nt, Influenza A virus
gaaagaggcgaagaaacaa

SEQ ID NO: 2490 - RNA, 19 nt, Influenza A virus
aaugaaauggggaauggag

SEQ ID NO: 2491 - RNA, 19 nt, Influenza A virus
uaaacuuugugagcaugga

SEQ ID NO: 2492 - RNA, 19 nt, Influenza A virus
aagaggcgaagaaacaauu

SEQ ID NO: 2493 - RNA, 19 nt, Influenza A virus
guaaacuuugugagcaugg

SEQ ID NO: 2494 - RNA, 19 nt, Influenza A virus
caguccgaaagaggcgaag

SEQ ID NO: 2495 - RNA, 19 nt, Influenza A virus
aguccgaaagaggcgaaga

SEQ ID NO: 2496 - RNA, 19 nt, Influenza A virus
cgaaagaggcgaagaaaca

SEQ ID NO: 2497 - RNA, 19 nt, Influenza A virus
ugguaaacuuugugagcau

SEQ ID NO: 2498 - RNA, 19 nt, Influenza A virus
gugguaaacuuugugagca

SEQ ID NO: 2499 - RNA, 19 nt, Influenza A virus
uuugugcgacaaugcuuca

SEQ ID NO: 2500 - RNA, 19 nt, Influenza A virus
ucgucaguccgaaagaggc

SEQ ID NO: 2501 - RNA, 19 nt, Influenza A virus
uugugcgacaaugcuucaa

SEQ ID NO: 2502 - RNA, 19 nt, Influenza A virus
uaagcgauuugaagcaaua

SEQ ID NO: 2503 - RNA, 19 nt, Influenza A virus
uucgucaguccgaaagagg

SEQ ID NO: 2504 - RNA, 19 nt, Influenza A virus
cgucaguccgaaagaggcg

SEQ ID NO: 2505 - RNA, 19 nt, Influenza A virus
gucaguccgaaagaggcga

SEQ ID NO: 2506 - RNA, 19 nt, Influenza A virus
ucaguccgaaagaggcgaa

SEQ ID NO: 2507 - RNA, 19 nt, Influenza A virus
gguaaacuuugugagcaug

SEQ ID NO: 2508 - RNA, 19 nt, Influenza A virus
uccgaaagaggcgaagaaa

SEQ ID NO: 2509 - RNA, 19 nt, Influenza A virus
ccgaaagaggcgaagaaac

SEQ ID NO: 2510 - RNA, 19 nt, Influenza A virus
uuucgucaguccgaaagag

SEQ ID NO: 2511 - RNA, 19 nt, Influenza A virus
uccuuucgucaguccgaaa

SEQ ID NO: 2512 - RNA, 19 nt, Influenza A virus
ccuuucgucaguccgaaag

SEQ ID NO: 2513 - RNA, 19 nt, Influenza A virus
gcgauuugaagcaauauga

SEQ ID NO: 2514 - RNA, 19 nt, Influenza A virus
cuuucgucaguccgaaaga

SEQ ID NO: 2515 - RNA, 19 nt, Influenza A virus
aagcgauuugaagcaauau

SEQ ID NO: 2516 - RNA, 19 nt, Influenza A virus
aagauuuugugcgacaaug

SEQ ID NO: 2517 - RNA, 19 nt, Influenza A virus
agcgauuugaagcaauaug

SEQ ID NO: 2518 - RNA, 19 nt, Influenza A virus
guccgaaagaggcgaagaa

SEQ ID NO: 2519 - RNA, 19 nt, Influenza A virus
ggcaagcuuucucaaaugu

SEQ ID NO: 2520 - RNA, 19 nt, Influenza A virus
acauucuuuggauggaaag

SEQ ID NO: 2521 - RNA, 19 nt, Influenza A virus
cauucuuuggauggaaaga

SEQ ID NO: 2522 - RNA, 19 nt, Influenza A virus
gauuugaagcaauaugaua

SEQ ID NO: 2523 - RNA, 19 nt, Influenza A virus
agggcaagcuuucucaaau

SEQ ID NO: 2524 - RNA, 19 nt, Influenza A virus
uugagggcaagcuuucuca

SEQ ID NO: 2525 - RNA, 19 nt, Influenza A virus
auuugaagcaauaugauag

SEQ ID NO: 2526 - RNA, 19 nt, Influenza A virus
auugagggcaagcuuucuc

SEQ ID NO: 2527 - RNA, 19 nt, Influenza A virus
gagggcaagcuuucucaaa

SEQ ID NO: 2528 - RNA, 19 nt, Influenza A virus
gggcaagcuuucucaaaug

SEQ ID NO: 2529 - RNA, 19 nt, Influenza A virus
cauugagggcaagcuuucu

SEQ ID NO: 2530 - RNA, 19 nt, Influenza A virus
gcaagcuuucucaaauguc

SEQ ID NO: 2531 - RNA, 19 nt, Influenza A virus
ugagggcaagcuuucucaa

SEQ ID NO: 2532 - RNA, 19 nt, Influenza A virus
cagaaugaguucaacaagg

SEQ ID NO: 2533 - RNA, 19 nt, Influenza A virus
agaaugaguucaacaaggc

SEQ ID NO: 2534 - RNA, 19 nt, Influenza A virus
auaagcgauuugaagcaau

SEQ ID NO: 2535 - RNA, 19 nt, Influenza A virus
uucuuuggauggaaagaac

SEQ ID NO: 2536 - RNA, 19 nt, Influenza A virus
cgauuugaagcaauaugau

SEQ ID NO: 2537 - RNA, 19 nt, Influenza A virus
ucuuuggauggaaagaacc

SEQ ID NO: 2538 - RNA, 19 nt, Influenza A virus
agccuauguggauggauuc

SEQ ID NO: 2539 - RNA, 19 nt, Influenza A virus
caaugaaagaguauggaga

SEQ ID NO: 2540 - RNA, 19 nt, Influenza A virus
ugaagcaauaugauaguga

SEQ ID NO: 2541 - RNA, 19 nt, Influenza A virus
uggaagauuuugugcgaca

SEQ ID NO: 2542 - RNA, 19 nt, Influenza A virus
auggaagauuuugugcgac

SEQ ID NO: 2543 - RNA, 19 nt, Influenza A virus
aaagaguuuuuugagaaua

SEQ ID NO: 2544 - RNA, 19 nt, Influenza A virus
uaaugaaggggguauacau

SEQ ID NO: 2545 - RNA, 19 nt, Influenza A virus
gaagauuuugugcgacaau

SEQ ID NO: 2546 - RNA, 19 nt, Influenza A virus
ucuggauagagcucgauga

SEQ ID NO: 2547 - RNA, 19 nt, Influenza A virus
auaaugaaggggguauaca

SEQ ID NO: 2548 - RNA, 19 nt, Influenza A virus
auucuuuggauggaaagaa

SEQ ID NO: 2549 - RNA, 19 nt, Influenza A virus
uugaagcaauaugauagug

SEQ ID NO: 2550 - RNA, 19 nt, Influenza A virus
gagaaagacaugaccaaag

SEQ ID NO: 2551 - RNA, 19 nt, Influenza A virus
uuugaagcaauaugauagu

SEQ ID NO: 2552 - RNA, 19 nt, Influenza A virus
agaaagacaugaccaaaga

SEQ ID NO: 2553 - RNA, 19 nt, Influenza A virus
gauuuugugcgacaaugcu

SEQ ID NO: 2554 - RNA, 19 nt, Influenza A virus
auuuugugcgacaaugcuu

SEQ ID NO: 2555 - RNA, 19 nt, Influenza A virus
ugaaggggguauacauuaa

SEQ ID NO: 2556 - RNA, 19 nt, Influenza A virus
agauuuugugcgacaaugc

SEQ ID NO: 2557 - RNA, 19 nt, Influenza A virus
ggaagauuuugugcgacaa

SEQ ID NO: 2558 - RNA, 19 nt, Influenza A virus
augaaggggguauacauua

SEQ ID NO: 2559 - RNA, 19 nt, Influenza A virus
aaugaaggggguauacauu

SEQ ID NO: 2560 - RNA, 19 nt, Influenza A virus
ccuauguggauggauucga

SEQ ID NO: 2561 - RNA, 19 nt, Influenza A virus
cuauguggauggauucgaa

SEQ ID NO: 2562 - RNA, 19 nt, Influenza A virus
auguggauggauucgaacc

SEQ ID NO: 2563 - RNA, 19 nt, Influenza A virus
uauguggauggauucgaac

SEQ ID NO: 2564 - RNA, 19 nt, Influenza A virus
aaagacaugaccaaagagu

SEQ ID NO: 2565 - RNA, 19 nt, Influenza A virus
aacauucuuuggauggaaa

SEQ ID NO: 2566 - RNA, 19 nt, Influenza A virus
aagacaugaccaaagaguu

SEQ ID NO: 2567 - RNA, 19 nt, Influenza A virus
uuuugugcgacaaugcuuc

SEQ ID NO: 2568 - RNA, 19 nt, Influenza A virus
gccuauguggauggauucg

SEQ ID NO: 2569 - RNA, 19 nt, Influenza A virus
gggauuccuuucgucaguc

SEQ ID NO: 2570 - RNA, 19 nt, Influenza A virus
ugggauuccuuucgucagu

SEQ ID NO: 2571 - RNA, 19 nt, Influenza A virus
gaaagacaugaccaaagag

SEQ ID NO: 2572 - RNA, 19 nt, Influenza A virus
gcaaugaaagaguauggag

SEQ ID NO: 2573 - RNA, 19 nt, Influenza A virus
auuccuuucgucaguccga

SEQ ID NO: 2574 - RNA, 19 nt, Influenza A virus
gauuccuuucgucaguccg

SEQ ID NO: 2575 - RNA, 19 nt, Influenza A virus
ggauuccuuucgucagucc

SEQ ID NO: 2576 - RNA, 19 nt, Influenza A virus
aaggggguauacauuaaua

SEQ ID NO: 2577 - RNA, 19 nt, Influenza A virus
gaaggggguauacauuaau

SEQ ID NO: 2578 - RNA, 19 nt, Influenza A virus
aaugaaagaguauggagag

SEQ ID NO: 2579 - RNA, 19 nt, Influenza A virus
aggggguauacauuaauac

SEQ ID NO: 2580 - RNA, 19 nt, Influenza A virus
uguaugauuacaaggagaa

SEQ ID NO: 2581 - RNA, 19 nt, Influenza A virus
ccgaacuucuccugccuug

SEQ ID NO: 2582 - RNA, 19 nt, Influenza A virus
cgaacuucuccugccuuga

SEQ ID NO: 2583 - RNA, 19 nt, Influenza A virus
aacuucuccugccuugaga

SEQ ID NO: 2584 - RNA, 19 nt, Influenza A virus
gaacuucuccugccuugag

SEQ ID NO: 2585 - RNA, 19 nt, Influenza A virus
aaagagaaagacaugacca

SEQ ID NO: 2586 - RNA, 19 nt, Influenza A virus
auggauucgaaccgaacgg

SEQ ID NO: 2587 - RNA, 19 nt, Influenza A virus
aagagaaagacaugaccaa

SEQ ID NO: 2588 - RNA, 19 nt, Influenza A virus
cucugggauuccuuucguc

SEQ ID NO: 2589 - RNA, 19 nt, Influenza A virus
gauggauucgaaccgaacg

SEQ ID NO: 2590 - RNA, 19 nt, Influenza A virus
ggguauacauuaauacugc

SEQ ID NO: 2591 - RNA, 19 nt, Influenza A virus
gggguauacauuaauacug

SEQ ID NO: 2592 - RNA, 19 nt, Influenza A virus
aagcuuucucaaaugucca

SEQ ID NO: 2593 - RNA, 19 nt, Influenza A virus
agcuuucucaaauguccaa

SEQ ID NO: 2594 - RNA, 19 nt, Influenza A virus
acaugaccaaagaguuuuu

SEQ ID NO: 2595 - RNA, 19 nt, Influenza A virus
agagaaagacaugaccaaa

SEQ ID NO: 2596 - RNA, 19 nt, Influenza A virus
ucugggauuccuuucguca

SEQ ID NO: 2597 - RNA, 19 nt, Influenza A virus
acuucuccugccuugagaa

SEQ ID NO: 2598 - RNA, 19 nt, Influenza A virus
gacaugaccaaagaguuuu

SEQ ID NO: 2599 - RNA, 19 nt, Influenza A virus
agacaugaccaaagaguuu

SEQ ID NO: 2600 - RNA, 19 nt, Influenza A virus
guggauggauucgaaccga

SEQ ID NO: 2601 - RNA, 19 nt, Influenza A virus
aagcacagauuugaaauaa

SEQ ID NO: 2602 - RNA, 19 nt, Influenza A virus
agcacagauuugaaauaau

SEQ ID NO: 2603 - RNA, 19 nt, Influenza A virus
caagcuuucucaaaugucc

SEQ ID NO: 2604 - RNA, 19 nt, Influenza A virus
gcuuucucaaauguccaaa

SEQ ID NO: 2605 - RNA, 19 nt, Influenza A virus
uggauggauucgaaccgaa

SEQ ID NO: 2606 - RNA, 19 nt, Influenza A virus
ggggguauacauuaauacu

SEQ ID NO: 2607 - RNA, 19 nt, Influenza A virus
ggauggauucgaaccgaac

SEQ ID NO: 2608 - RNA, 19 nt, Influenza A virus
uguggauggauucgaaccg

SEQ ID NO: 2609 - RNA, 19 nt, Influenza A virus
cuugagaauuuuagagccu

SEQ ID NO: 2610 - RNA, 19 nt, Influenza A virus
gccuugagaauuuuagagc

SEQ ID NO: 2611 - RNA, 19 nt, Influenza A virus
cugccuugagaauuuuaga

SEQ ID NO: 2612 - RNA, 19 nt, Influenza A virus
uccugccuugagaauuuua

SEQ ID NO: 2613 - RNA, 19 nt, Influenza A virus
ugugcagcaauggacgauu

SEQ ID NO: 2614 - RNA, 19 nt, Influenza A virus
gugcagcaauggacgauuu

SEQ ID NO: 2615 - RNA, 19 nt, Influenza A virus
uucuccugccuugagaauu

SEQ ID NO: 2616 - RNA, 19 nt, Influenza A virus
cuccugccuugagaauuuu

SEQ ID NO: 2617 - RNA, 19 nt, Influenza A virus
ugccuugagaauuuuagag

SEQ ID NO: 2618 - RNA, 19 nt, Influenza A virus
ucuccugccuugagaauuu

SEQ ID NO: 2619 - RNA, 19 nt, Influenza A virus
ccugccuugagaauuuuag

SEQ ID NO: 2620 - RNA, 19 nt, Influenza A virus
ccuugagaauuuuagagcc

SEQ ID NO: 2621 - RNA, 19 nt, Influenza A virus
ugcauugagggcaagcuuu

SEQ ID NO: 2622 - RNA, 19 nt, Influenza A virus
ggccucugggauuccuuuc

SEQ ID NO: 2623 - RNA, 19 nt, Influenza A virus
gcauugagggcaagcuuuc

SEQ ID NO: 2624 - RNA, 19 nt, Influenza A virus
auccugugcagcaauggac

SEQ ID NO: 2625 - RNA, 19 nt, Influenza A virus
uccugugcagcaauggacg

SEQ ID NO: 2626 - RNA, 19 nt, Influenza A virus
agaggccucugggauuccu

SEQ ID NO: 2627 - RNA, 19 nt, Influenza A virus
aggccucugggauuccuuu

SEQ ID NO: 2628 - RNA, 19 nt, Influenza A virus
cuucuccugccuugagaau

SEQ ID NO: 2629 - RNA, 19 nt, Influenza A virus
gccucugggauuccuuucg

SEQ ID NO: 2630 - RNA, 19 nt, Influenza A virus
gaggccucugggauuccuu

SEQ ID NO: 2631 - RNA, 19 nt, Influenza A virus
ccugugcagcaauggacga

SEQ ID NO: 2632 - RNA, 19 nt, Influenza A virus
ccucugggauuccuuucgu

SEQ ID NO: 2633 - RNA, 19 nt, Influenza A virus
cugggauuccuuucgucag

SEQ ID NO: 2634 - RNA, 19 nt, Influenza A virus
cugugcagcaauggacgau

SEQ ID NO: 2635 - RNA, 19 nt, Influenza A virus
ggauucgaaccgaacggcu

SEQ ID NO: 2636 - RNA, 19 nt, Influenza A virus
uggauucgaaccgaacggc

SEQ ID NO: 2637 - RNA, 19 nt, Influenza A virus
cagaggccucugggauucc

SEQ ID NO: 2638 - RNA, 19 nt, Influenza A virus
acggcugcauugagggcaa

SEQ ID NO: 2639 - RNA, 19 nt, Influenza A virus
aacggcugcauugagggca

SEQ ID NO: 2640 - RNA, 19 nt, Influenza A virus
gcugcauugagggcaagcu

SEQ ID NO: 2641 - RNA, 19 nt, Influenza A virus
uuccuuucgucaguccgaa

SEQ ID NO: 2642 - RNA, 19 nt, Influenza A virus
cugcauugagggcaagcuu

SEQ ID NO: 2643 - RNA, 19 nt, Influenza A virus
ggcugcauugagggcaagc

SEQ ID NO: 2644 - RNA, 19 nt, Influenza A virus
cggcugcauugagggcaag

SEQ ID NO: 2645 - RNA, 19 nt, Influenza A virus
uuguaugauuacaaggaga

SEQ ID NO: 2646 - RNA, 19 nt, Influenza A virus
auagugacgaaccugaauu

SEQ ID NO: 2647 - RNA, 19 nt, Influenza A virus
ggggcuauaugaagcaauu

SEQ ID NO: 2648 - RNA, 19 nt, Influenza A virus
ugaccaaagaguuuuuuga

SEQ ID NO: 2649 - RNA, 19 nt, Influenza A virus
uuguucaggcucuuaggga

SEQ ID NO: 2650 - RNA, 19 nt, Influenza A virus
caugaccaaagaguuuuuu

SEQ ID NO: 2651 - RNA, 19 nt, Influenza A virus
augaccaaagaguuuuuug

SEQ ID NO: 2652 - RNA, 19 nt, Influenza A virus
uuuucucauucacugggga

SEQ ID NO: 2653 - RNA, 19 nt, Influenza A virus
uguucaggcucuuagggac

SEQ ID NO: 2654 - RNA, 19 nt, Influenza A virus
gaccaaagaguuuuuugag

SEQ ID NO: 2655 - RNA, 19 nt, Influenza A virus
cauuuucucauucacuggg

SEQ ID NO: 2656 - RNA, 19 nt, Influenza A virus
auuuucucauucacugggg

SEQ ID NO: 2657 - RNA, 19 nt, Influenza A virus
aagcaauaugauagugacg

SEQ ID NO: 2658 - RNA, 19 nt, Influenza A virus
gauagugacgaaccugaau

SEQ ID NO: 2659 - RNA, 19 nt, Influenza A virus
agcaauaugauagugacga

SEQ ID NO: 2660 - RNA, 19 nt, Influenza A virus
accaaagaguuuuuugaga

SEQ ID NO: 2661 - RNA, 19 nt, Influenza A virus
cuugccgaccaaagucucc

SEQ ID NO: 2662 - RNA, 19 nt, Influenza A virus
uugccgaccaaagucuccc

SEQ ID NO: 2663 - RNA, 19 nt, Influenza A virus
uaugauagugacgaaccug

SEQ ID NO: 2664 - RNA, 19 nt, Influenza A virus
aauaugauagugacgaacc

SEQ ID NO: 2665 - RNA, 19 nt, Influenza A virus
ugauagugacgaaccugaa

SEQ ID NO: 2666 - RNA, 19 nt, Influenza A virus
augauagugacgaaccuga

SEQ ID NO: 2667 - RNA, 19 nt, Influenza A virus
caauaugauagugacgaac

SEQ ID NO: 2668 - RNA, 19 nt, Influenza A virus
uugaugauccaaaugcacu

SEQ ID NO: 2669 - RNA, 19 nt, Influenza A virus
cuuucucaaauguccaaag

SEQ ID NO: 2670 - RNA, 19 nt, Influenza A virus
ucaauagccuguaugcauc

SEQ ID NO: 2671 - RNA, 19 nt, Influenza A virus
aaggccuauguucuuguau

SEQ ID NO: 2672 - RNA, 19 nt, Influenza A virus
aaaugggagaaauacugug

SEQ ID NO: 2673 - RNA, 19 nt, Influenza A virus
auaugauagugacgaaccu

SEQ ID NO: 2674 - RNA, 19 nt, Influenza A virus
aaugggagaaauacugugu

SEQ ID NO: 2675 - RNA, 19 nt, Influenza A virus
cuugaugauccaaaugcac

SEQ ID NO: 2676 - RNA, 19 nt, Influenza A virus
uucaauagccuguaugcau

SEQ ID NO: 2677 - RNA, 19 nt, Influenza A virus
gaagcaauaugauagugac

SEQ ID NO: 2678 - RNA, 19 nt, Influenza A virus
gcuugccgaccaaagucuc

SEQ ID NO: 2679 - RNA, 19 nt, Influenza A virus
caaggccuauguucuugua

SEQ ID NO: 2680 - RNA, 19 nt, Influenza A virus
gcaauaugauagugacgaa

SEQ ID NO: 2681 - RNA, 19 nt, Influenza A virus
ucaaggccuauguucuugu

SEQ ID NO: 2682 - RNA, 19 nt, Influenza A virus
ccaaagaguuuuuugagaa

SEQ ID NO: 2683 - RNA, 19 nt, Influenza A virus
aggccuauguucuuguaug

SEQ ID NO: 2684 - RNA, 19 nt, Influenza A virus
uaagaagugccauaggcca

SEQ ID NO: 2685 - RNA, 19 nt, Influenza A virus
ggccuauguucuuguaugu

SEQ ID NO: 2686 - RNA, 19 nt, Influenza A virus
cucaaauguccaaagaagu

SEQ ID NO: 2687 - RNA, 19 nt, Influenza A virus
ucucaaauguccaaagaag

SEQ ID NO: 2688 - RNA, 19 nt, Influenza A virus
uuucucaaauguccaaaga

SEQ ID NO: 2689 - RNA, 19 nt, Influenza A virus
aaccgaacggcugcauuga

SEQ ID NO: 2690 - RNA, 19 nt, Influenza A virus
ccaauaaaauuaaaucuga

SEQ ID NO: 2691 - RNA, 19 nt, Influenza A virus
gccaauaaaauuaaaucug

SEQ ID NO: 2692 - RNA, 19 nt, Influenza A virus
uucucaaauguccaaagaa

SEQ ID NO: 2693 - RNA, 19 nt, Influenza A virus
aggcuugccgaccaaaguc

SEQ ID NO: 2694 - RNA, 19 nt, Influenza A virus
aggucacuuucaagcugga

SEQ ID NO: 2695 - RNA, 19 nt, Influenza A virus
cuauguucuuguaugugag

SEQ ID NO: 2696 - RNA, 19 nt, Influenza A virus
ggucacuuucaagcuggau

SEQ ID NO: 2697 - RNA, 19 nt, Influenza A virus
ugugguaaacuuugugagc

SEQ ID NO: 2698 - RNA, 19 nt, Influenza A virus
cgaacggcugcauugaggg

SEQ ID NO: 2699 - RNA, 19 nt, Influenza A virus
augugguaaacuuugugag

SEQ ID NO: 2700 - RNA, 19 nt, Influenza A virus
ccuauguucuuguauguga

SEQ ID NO: 2701 - RNA, 19 nt, Influenza A virus
gaugugguaaacuuuguga

SEQ ID NO: 2702 - RNA, 19 nt, Influenza A virus
ggcuugccgaccaaagucu

SEQ ID NO: 2703 - RNA, 19 nt, Influenza A virus
ccgaacggcugcauugagg

SEQ ID NO: 2704 - RNA, 19 nt, Influenza A virus
caauaaaauuaaaucugag

SEQ ID NO: 2705 - RNA, 19 nt, Influenza A virus
gccuauguucuuguaugug

SEQ ID NO: 2706 - RNA, 19 nt, Influenza A virus
acagaggccucugggauuc

SEQ ID NO: 2707 - RNA, 19 nt, Influenza A virus
accgaacggcugcauugag

SEQ ID NO: 2708 - RNA, 19 nt, Influenza A virus
acgaaccugaauuaagguc

SEQ ID NO: 2709 - RNA, 19 nt, Influenza A virus
auguucuuguaugugagga

SEQ ID NO: 2710 - RNA, 19 nt, Influenza A virus
uuuucucucacugacccga

SEQ ID NO: 2711 - RNA, 19 nt, Influenza A virus
aacagaggccucugggauu

SEQ ID NO: 2712 - RNA, 19 nt, Influenza A virus
uuucucucacugacccgag

SEQ ID NO: 2713 - RNA, 19 nt, Influenza A virus
gaacggcugcauugagggc

SEQ ID NO: 2714 - RNA, 19 nt, Influenza A virus
uguucuuguaugugaggac

SEQ ID NO: 2715 - RNA, 19 nt, Influenza A virus
aauaaaauuaaaucugaga

SEQ ID NO: 2716 - RNA, 19 nt, Influenza A virus
gacgaaccugaauuaaggu

SEQ ID NO: 2717 - RNA, 19 nt, Influenza A virus
auaaaauuaaaucugagaa

SEQ ID NO: 2718 - RNA, 19 nt, Influenza A virus
gccaacagaggccucuggg

SEQ ID NO: 2719 - RNA, 19 nt, Influenza A virus
uggccaacagaggccucug

SEQ ID NO: 2720 - RNA, 19 nt, Influenza A virus
cuaagaagugccauaggcc

SEQ ID NO: 2721 - RNA, 19 nt, Influenza A virus
ccaacagaggccucuggga

SEQ ID NO: 2722 - RNA, 19 nt, Influenza A virus
caacagaggccucugggau

SEQ ID NO: 2723 - RNA, 19 nt, Influenza A virus
ggccaacagaggccucugg

SEQ ID NO: 2724 - RNA, 19 nt, Influenza A virus
auggccaacagaggccucu

SEQ ID NO: 2725 - RNA, 19 nt, Influenza A virus
uucuuguaugugaggacaa

SEQ ID NO: 2726 - RNA, 19 nt, Influenza A virus
ucuuguaugugaggacaaa

SEQ ID NO: 2727 - RNA, 19 nt, Influenza A virus
aaaaggccaauaaaauuaa

SEQ ID NO: 2728 - RNA, 19 nt, Influenza A virus
aggccaauaaaauuaaauc

SEQ ID NO: 2729 - RNA, 19 nt, Influenza A virus
aaaggccaauaaaauuaaa

SEQ ID NO: 2730 - RNA, 19 nt, Influenza A virus
gaaaaggccaauaaaauua

SEQ ID NO: 2731 - RNA, 19 nt, Influenza A virus
cgaaccugaauuaagguca

SEQ ID NO: 2732 - RNA, 19 nt, Influenza A virus
uuuuuugagaauaaaucag

SEQ ID NO: 2733 - RNA, 19 nt, Influenza A virus
aaggccaauaaaauuaaau

SEQ ID NO: 2734 - RNA, 19 nt, Influenza A virus
guucuuguaugugaggaca

SEQ ID NO: 2735 - RNA, 19 nt, Influenza A virus
uuuuugagaauaaaucaga

SEQ ID NO: 2736 - RNA, 19 nt, Influenza A virus
uuuugagaauaaaucagaa

SEQ ID NO: 2737 - RNA, 19 nt, Influenza A virus
guuuuuugagaauaaauca

SEQ ID NO: 2738 - RNA, 19 nt, Influenza A virus
aguuuuuugagaauaaauc

SEQ ID NO: 2739 - RNA, 19 nt, Influenza A virus
aagaguuuuuugagaauaa

SEQ ID NO: 2740 - RNA, 19 nt, Influenza A virus
gaguuuuuugagaauaaau

SEQ ID NO: 2741 - RNA, 19 nt, Influenza A virus
agugacgaaccugaauuaa

SEQ ID NO: 2742 - RNA, 19 nt, Influenza A virus
gugacgaaccugaauuaag

SEQ ID NO: 2743 - RNA, 19 nt, Influenza A virus
aaauggccaacagaggccu

SEQ ID NO: 2744 - RNA, 19 nt, Influenza A virus
gggggcuauaugaagcaau

SEQ ID NO: 2745 - RNA, 19 nt, Influenza A virus
gaaauggccaacagaggcc

SEQ ID NO: 2746 - RNA, 19 nt, Influenza A virus
caaagaguuuuuugagaau

SEQ ID NO: 2747 - RNA, 19 nt, Influenza A virus
agaguuuuuugagaauaaa

SEQ ID NO: 2748 - RNA, 19 nt, Influenza A virus
uggacaguaguaaacagua

SEQ ID NO: 2749 - RNA, 19 nt, Influenza A virus
ggacaguaguaaacaguau

SEQ ID NO: 2750 - RNA, 19 nt, Influenza A virus
ggccaauaaaauuaaaucu

SEQ ID NO: 2751 - RNA, 19 nt, Influenza A virus
acaauggccuggacaguag

SEQ ID NO: 2752 - RNA, 19 nt, Influenza A virus
caauggccuggacaguagu

SEQ ID NO: 2753 - RNA, 19 nt, Influenza A virus
gccuggacaguaguaaaca

SEQ ID NO: 2754 - RNA, 19 nt, Influenza A virus
auggccuggacaguaguaa

SEQ ID NO: 2755 - RNA, 19 nt, Influenza A virus
uggccuggacaguaguaaa

SEQ ID NO: 2756 - RNA, 19 nt, Influenza A virus
acauaagcgauuugaagca

SEQ ID NO: 2757 - RNA, 19 nt, Influenza A virus
ggggggcuauaugaagcaa

SEQ ID NO: 2758 - RNA, 19 nt, Influenza A virus
ggccuggacaguaguaaac

SEQ ID NO: 2759 - RNA, 19 nt, Influenza A virus
ggagaaauacuguguccuu

SEQ ID NO: 2760 - RNA, 19 nt, Influenza A virus
gacauaagcgauuugaagc

SEQ ID NO: 2761 - RNA, 19 nt, Influenza A virus
agaaauacuguguccuuga

SEQ ID NO: 2762 - RNA, 19 nt, Influenza A virus
ugggagaaauacugugucc

SEQ ID NO: 2763 - RNA, 19 nt, Influenza A virus
gggagaaauacuguguccu

SEQ ID NO: 2764 - RNA, 19 nt, Influenza A virus
agacauaagcgauuugaag

SEQ ID NO: 2765 - RNA, 19 nt, Influenza A virus
gagaaauacuguguccuug

SEQ ID NO: 2766 - RNA, 19 nt, Influenza A virus
ccuggacaguaguaaacag

SEQ ID NO: 2767 - RNA, 19 nt, Influenza A virus
gagacauaagcgauuugaa

SEQ ID NO: 2768 - RNA, 19 nt, Influenza A virus
agagacauaagcgauuuga

SEQ ID NO: 2769 - RNA, 19 nt, Influenza A virus
gaggaaagcagggcuagga

SEQ ID NO: 2770 - RNA, 19 nt, Influenza A virus
aggaaagcagggcuaggau

SEQ ID NO: 2771 - RNA, 19 nt, Influenza A virus
augggagaaauacuguguc

SEQ ID NO: 2772 - RNA, 19 nt, Influenza A virus
ugauugaagccgaguccuc

SEQ ID NO: 2773 - RNA, 19 nt, Influenza A virus
uaccuugaaaaggccaaua

SEQ ID NO: 2774 - RNA, 19 nt, Influenza A virus
augauugaagccgaguccu

SEQ ID NO: 2775 - RNA, 19 nt, Influenza A virus
cauaagcgauuugaagcaa

SEQ ID NO: 2776 - RNA, 19 nt, Influenza A virus
accuugaaaaggccaauaa

SEQ ID NO: 2777 - RNA, 19 nt, Influenza A virus
aacauggcaccagagaaag

SEQ ID NO: 2778 - RNA, 19 nt, Influenza A virus
ucacagcagagguguccca

SEQ ID NO: 2779 - RNA, 19 nt, Influenza A virus
cuaaaaacaugaagaaaac

SEQ ID NO: 2780 - RNA, 19 nt, Influenza A virus
uucacagcagagguguccc

SEQ ID NO: 2781 - RNA, 19 nt, Influenza A virus
acaacaccaagaccaauca

SEQ ID NO: 2782 - RNA, 19 nt, Influenza A virus
acauggcaccagagaaagu

SEQ ID NO: 2783 - RNA, 19 nt, Influenza A virus
aauggccaacagaggccuc

SEQ ID NO: 2784 - RNA, 19 nt, Influenza A virus
auguccaaagaagugaaug

SEQ ID NO: 2785 - RNA, 19 nt, Influenza A virus
uucucucacugacccgaga

SEQ ID NO: 2786 - RNA, 19 nt, Influenza A virus
uguccaaagaagugaaugc

SEQ ID NO: 2787 - RNA, 19 nt, Influenza A virus
uugaaaaggccaauaaaau

SEQ ID NO: 2788 - RNA, 19 nt, Influenza A virus
cauggcccauuggggaguc

SEQ ID NO: 2789 - RNA, 19 nt, Influenza A virus
agccacauaaaugggagaa

SEQ ID NO: 2790 - RNA, 19 nt, Influenza A virus
aauggccuggacaguagua

SEQ ID NO: 2791 - RNA, 19 nt, Influenza A virus
ccacauaaaugggagaaau

SEQ ID NO: 2792 - RNA, 19 nt, Influenza A virus
acauaaaugggagaaauac

SEQ ID NO: 2793 - RNA, 19 nt, Influenza A virus
gagccacauaaaugggaga

SEQ ID NO: 2794 - RNA, 19 nt, Influenza A virus
agcaugauugaagccgagu

SEQ ID NO: 2795 - RNA, 19 nt, Influenza A virus
ugacgaaccugaauuaagg

SEQ ID NO: 2796 - RNA, 19 nt, Influenza A virus
caaauguccaaagaaguga

SEQ ID NO: 2797 - RNA, 19 nt, Influenza A virus
gcaugauugaagccgaguc

SEQ ID NO: 2798 - RNA, 19 nt, Influenza A virus
ugaaaaggccaauaaaauu

SEQ ID NO: 2799 - RNA, 19 nt, Influenza A virus
auaaaugggagaaauacug

SEQ ID NO: 2800 - RNA, 19 nt, Influenza A virus
cauaaaugggagaaauacu

SEQ ID NO: 2801 - RNA, 19 nt, Influenza A virus
cacauaaaugggagaaaua

SEQ ID NO: 2802 - RNA, 19 nt, Influenza A virus
aaauguccaaagaagugaa

SEQ ID NO: 2803 - RNA, 19 nt, Influenza A virus
uaaaugggagaaauacugu

SEQ ID NO: 2804 - RNA, 19 nt, Influenza A virus
aauguccaaagaagugaau

SEQ ID NO: 2805 - RNA, 19 nt, Influenza A virus
cuugaaaaggccaauaaaa

SEQ ID NO: 2806 - RNA, 19 nt, Influenza A virus
cuggacaguaguaaacagu

SEQ ID NO: 2807 - RNA, 19 nt, Influenza A virus
gaaccgaacggcugcauug

SEQ ID NO: 2808 - RNA, 19 nt, Influenza A virus
uuuucauuucaucaaugaa

SEQ ID NO: 2809 - RNA, 19 nt, Influenza A virus
gccacauaaaugggagaaa

SEQ ID NO: 2810 - RNA, 19 nt, Influenza A virus
ugcagaacuaaagagggaa

SEQ ID NO: 2811 - RNA, 19 nt, Influenza A virus
cgaaccgaacggcugcauu

SEQ ID NO: 2812 - RNA, 19 nt, Influenza A virus
cacacgaaaagggaauaaa

SEQ ID NO: 2813 - RNA, 19 nt, Influenza A virus
uuucauuucaucaaugaac

SEQ ID NO: 2814 - RNA, 19 nt, Influenza A virus
ucgaaccgaacggcugcau

SEQ ID NO: 2815 - RNA, 19 nt, Influenza A virus
ccacacgaaaagggaauaa

SEQ ID NO: 2816 - RNA, 19 nt, Influenza A virus
uagugacgaaccugaauua

SEQ ID NO: 2817 - RNA, 19 nt, Influenza A virus
uucgaaccgaacggcugca

SEQ ID NO: 2818 - RNA, 19 nt, Influenza A virus
gcagaacuaaagagggaag

SEQ ID NO: 2819 - RNA, 19 nt, Influenza A virus
acacgaaaagggaauaaau

SEQ ID NO: 2820 - RNA, 19 nt, Influenza A virus
ucucucacugacccgagac

SEQ ID NO: 2821 - RNA, 19 nt, Influenza A virus
cucucacugacccgagacu

SEQ ID NO: 2822 - RNA, 19 nt, Influenza A virus
uuucauguauucagauuuu

SEQ ID NO: 2823 - RNA, 19 nt, Influenza A virus
guuucauguauucagauuu

SEQ ID NO: 2824 - RNA, 19 nt, Influenza A virus
uguuucauguauucagauu

SEQ ID NO: 2825 - RNA, 19 nt, Influenza A virus
aaagcacagauuugaaaua

SEQ ID NO: 2826 - RNA, 19 nt, Influenza A virus
accacacgaaaagggaaua

SEQ ID NO: 2827 - RNA, 19 nt, Influenza A virus
aagaaauggccaacagagg

SEQ ID NO: 2828 - RNA, 19 nt, Influenza A virus
auucgaaccgaacggcugc

SEQ ID NO: 2829 - RNA, 19 nt, Influenza A virus
caagaaauggccaacagag

SEQ ID NO: 2830 - RNA, 19 nt, Influenza A virus
uucauuucaucaaugaaca

SEQ ID NO: 2831 - RNA, 19 nt, Influenza A virus
uauguucuuguaugugagg

SEQ ID NO: 2832 - RNA, 19 nt, Influenza A virus
uaaagcacagauuugaaau

SEQ ID NO: 2833 - RNA, 19 nt, Influenza A virus
gauucgaaccgaacggcug

SEQ ID NO: 2834 - RNA, 19 nt, Influenza A virus
auuucaucaaugaacaagg

SEQ ID NO: 2835 - RNA, 19 nt, Influenza A virus
ucauuucaucaaugaacaa

SEQ ID NO: 2836 - RNA, 19 nt, Influenza A virus
cauuucaucaaugaacaag

SEQ ID NO: 2837 - RNA, 19 nt, Influenza A virus
aaccugaauuaaggucacu

SEQ ID NO: 2838 - RNA, 19 nt, Influenza A virus
aauuaaggucacuuucaag

SEQ ID NO: 2839 - RNA, 19 nt, Influenza A virus
gaaccugaauuaaggucac

SEQ ID NO: 2840 - RNA, 19 nt, Influenza A virus
ucacuggggaggaaauggc

SEQ ID NO: 2841 - RNA, 19 nt, Influenza A virus
cauucacuggggaggaaau

SEQ ID NO: 2842 - RNA, 19 nt, Influenza A virus
ucauucacuggggaggaaa

SEQ ID NO: 2843 - RNA, 19 nt, Influenza A virus
uucacuggggaggaaaugg

SEQ ID NO: 2844 - RNA, 19 nt, Influenza A virus
auucacuggggaggaaaug

SEQ ID NO: 2845 - RNA, 19 nt, Influenza A virus
aaaccacacgaaaagggaa

SEQ ID NO: 2846 - RNA, 19 nt, Influenza A virus
cacuggggaggaaauggcc

SEQ ID NO: 2847 - RNA, 19 nt, Influenza A virus
aaccacacgaaaagggaau

SEQ ID NO: 2848 - RNA, 19 nt, Influenza A virus
uggggaauggagaugagac

SEQ ID NO: 2849 - RNA, 19 nt, Influenza A virus
ugaauuaaggucacuuuca

SEQ ID NO: 2850 - RNA, 19 nt, Influenza A virus
agcauugaagacccaaguc

SEQ ID NO: 2851 - RNA, 19 nt, Influenza A virus
gaauuaaggucacuuucaa

SEQ ID NO: 2852 - RNA, 19 nt, Influenza A virus
gaaaaaccaauuuauaugg

SEQ ID NO: 2853 - RNA, 19 nt, Influenza A virus
auggggaauggagaugaga

SEQ ID NO: 2854 - RNA, 19 nt, Influenza A virus
cugaauuaaggucacuuuc

SEQ ID NO: 2855 - RNA, 19 nt, Influenza A virus
gcauugaagacccaaguca

SEQ ID NO: 2856 - RNA, 19 nt, Influenza A virus
ggggaauggagaugagacg

SEQ ID NO: 2857 - RNA, 19 nt, Influenza A virus
ccugaauuaaggucacuuu

SEQ ID NO: 2858 - RNA, 19 nt, Influenza A virus
cgaaaaaccaauuuauaug

SEQ ID NO: 2859 - RNA, 19 nt, Influenza A virus
aaggucacuuucaagcugg

SEQ ID NO: 2860 - RNA, 19 nt, Influenza A virus
uggcaccagagaaaguaga

SEQ ID NO: 2861 - RNA, 19 nt, Influenza A virus
auggcaccagagaaaguag

SEQ ID NO: 2862 - RNA, 19 nt, Influenza A virus
agaaauggccaacagaggc

SEQ ID NO: 2863 - RNA, 19 nt, Influenza A virus
agagcaugauugaagccga

SEQ ID NO: 2864 - RNA, 19 nt, Influenza A virus
cauggcaccagagaaagua

SEQ ID NO: 2865 - RNA, 19 nt, Influenza A virus
auugaagacccaagucacg

SEQ ID NO: 2866 - RNA, 19 nt, Influenza A virus
cauugaagacccaagucac

SEQ ID NO: 2867 - RNA, 19 nt, Influenza A virus
ucucauucacuggggagga

SEQ ID NO: 2868 - RNA, 19 nt, Influenza A virus
uucucauucacuggggagg

SEQ ID NO: 2869 - RNA, 19 nt, Influenza A virus
uugaagacccaagucacga

SEQ ID NO: 2870 - RNA, 19 nt, Influenza A virus
cggagucaagaaaacugcu

SEQ ID NO: 2871 - RNA, 19 nt, Influenza A virus
accugaauuaaggucacuu

SEQ ID NO: 2872 - RNA, 19 nt, Influenza A virus
gagagcaugauugaagccg

SEQ ID NO: 2873 - RNA, 19 nt, Influenza A virus
uaaggucacuuucaagcug

SEQ ID NO: 2874 - RNA, 19 nt, Influenza A virus
gcggagucaagaaaacugc

SEQ ID NO: 2875 - RNA, 19 nt, Influenza A virus
gcaccagagaaaguagacu

SEQ ID NO: 2876 - RNA, 19 nt, Influenza A virus
caccagagaaaguagacuu

SEQ ID NO: 2877 - RNA, 19 nt, Influenza A virus
uuaaagcacagauuugaaa

SEQ ID NO: 2878 - RNA, 19 nt, Influenza A virus
ggcaccagagaaaguagac

SEQ ID NO: 2879 - RNA, 19 nt, Influenza A virus
ccagagaaaguagacuuug

SEQ ID NO: 2880 - RNA, 19 nt, Influenza A virus
gagcaugauugaagccgag

SEQ ID NO: 2881 - RNA, 19 nt, Influenza A virus
accagagaaaguagacuuu

SEQ ID NO: 2882 - RNA, 19 nt, Influenza A virus
cucauucacuggggaggaa

SEQ ID NO: 2883 - RNA, 19 nt, Influenza A virus
aacaccaagaccaaucaaa

SEQ ID NO: 2884 - RNA, 19 nt, Influenza A virus
uauaugaugcgaucaagug

SEQ ID NO: 2885 - RNA, 19 nt, Influenza A virus
ccuugaaaaggccaauaaa

SEQ ID NO: 2886 - RNA, 19 nt, Influenza A virus
cagagaaaguagacuuuga

SEQ ID NO: 2887 - RNA, 19 nt, Influenza A virus
uuucucauucacuggggag

SEQ ID NO: 2888 - RNA, 19 nt, Influenza A virus
acaccaagaccaaucaaac

SEQ ID NO: 2889 - RNA, 19 nt, Influenza A virus
uuaaggucacuuucaagcu

SEQ ID NO: 2890 - RNA, 19 nt, Influenza A virus
caccaagaccaaucaaacu

SEQ ID NO: 2891 - RNA, 19 nt, Influenza A virus
auuaaggucacuuucaagc

SEQ ID NO: 2892 - RNA, 19 nt, Influenza A virus
caacaccaagaccaaucaa

SEQ ID NO: 2893 - RNA, 19 nt, Influenza A virus
uuuucagcggagucaagaa

SEQ ID NO: 2894 - RNA, 19 nt, Influenza A virus
acuaaaaacaugaagaaaa

SEQ ID NO: 2895 - RNA, 19 nt, Influenza A virus
cagcggagucaagaaaacu

SEQ ID NO: 2896 - RNA, 19 nt, Influenza A virus
uuucagcggagucaagaaa

SEQ ID NO: 2897 - RNA, 19 nt, Influenza A virus
agcggagucaagaaaacug

SEQ ID NO: 2898 - RNA, 19 nt, Influenza A virus
uucagcggagucaagaaaa

SEQ ID NO: 2899 - RNA, 19 nt, Influenza A virus
ucagcggagucaagaaaac

SEQ ID NO: 2900 - RNA, 19 nt, Influenza A virus
ccgaugauugucgaacuug

SEQ ID NO: 2901 - RNA, 19 nt, Influenza A virus
gcaagcaugaggaggaauu

SEQ ID NO: 2902 - RNA, 19 nt, Influenza A virus
caugauugaagccgagucc

SEQ ID NO: 2903 - RNA, 19 nt, Influenza A virus
cgaugauugucgaacuugc

SEQ ID NO: 2904 - RNA, 19 nt, Influenza A virus
auugcaagcaugaggagga

SEQ ID NO: 2905 - RNA, 19 nt, Influenza A virus
uugcaagcaugaggaggaa

SEQ ID NO: 2906 - RNA, 19 nt, Influenza A virus
caagcaugaggaggaauua

SEQ ID NO: 2907 - RNA, 19 nt, Influenza A virus
gauccaaaugcacuguuaa

SEQ ID NO: 2908 - RNA, 19 nt, Influenza A virus
ccaagggaguggaagaagg

SEQ ID NO: 2909 - RNA, 19 nt, Influenza A virus
acauugcaagcaugaggag

SEQ ID NO: 2910 - RNA, 19 nt, Influenza A virus
auccaaaugcacuguuaaa

SEQ ID NO: 2911 - RNA, 19 nt, Influenza A virus
cauugcaagcaugaggagg

SEQ ID NO: 2912 - RNA, 19 nt, Influenza A virus
cccaagggaguggaagaag

SEQ ID NO: 2913 - RNA, 19 nt, Influenza A virus
gacccaagucacgaaggag

SEQ ID NO: 2914 - RNA, 19 nt, Influenza A virus
gguauacauuaauacugcc

SEQ ID NO: 2915 - RNA, 19 nt, Influenza A virus
acccaagucacgaaggaga

SEQ ID NO: 2916 - RNA, 19 nt, Influenza A virus
ucaaugcauccugugcagc

SEQ ID NO: 2917 - RNA, 19 nt, Influenza A virus
gaggaaauggccacaaagg

SEQ ID NO: 2918 - RNA, 19 nt, Influenza A virus
uggagaugagacguugccu

SEQ ID NO: 2919 - RNA, 19 nt, Influenza A virus
caaugcauccugugcagca

SEQ ID NO: 2920 - RNA, 19 nt, Influenza A virus
aggaaauggccacaaaggc

SEQ ID NO: 2921 - RNA, 19 nt, Influenza A virus
ugcaagcaugaggaggaau

SEQ ID NO: 2922 - RNA, 19 nt, Influenza A virus
auggagaugagacguugcc

SEQ ID NO: 2923 - RNA, 19 nt, Influenza A virus
cucaaugcauccugugcag

SEQ ID NO: 2924 - RNA, 19 nt, Influenza A virus
acaauugaagaaaaauuug

SEQ ID NO: 2925 - RNA, 19 nt, Influenza A virus
ugaugauccaaaugcacug

SEQ ID NO: 2926 - RNA, 19 nt, Influenza A virus
caauugaagaaaaauuuga

SEQ ID NO: 2927 - RNA, 19 nt, Influenza A virus
aauugaagaaaaauuugaa

SEQ ID NO: 2928 - RNA, 19 nt, Influenza A virus
gcucaaugcauccugugca

SEQ ID NO: 2929 - RNA, 19 nt, Influenza A virus
ucaaaccacacgaaaaggg

SEQ ID NO: 2930 - RNA, 19 nt, Influenza A virus
uugaagaaaaauuugaaau

SEQ ID NO: 2931 - RNA, 19 nt, Influenza A virus
ggagaugagacguugccuc

SEQ ID NO: 2932 - RNA, 19 nt, Influenza A virus
auugaagaaaaauuugaaa

SEQ ID NO: 2933 - RNA, 19 nt, Influenza A virus
ugcucaaugcauccugugc

SEQ ID NO: 2934 - RNA, 19 nt, Influenza A virus
gagaugagacguugccucc

SEQ ID NO: 2935 - RNA, 19 nt, Influenza A virus
gaauggagaugagacguug

SEQ ID NO: 2936 - RNA, 19 nt, Influenza A virus
gaagacccaagucacgaag

SEQ ID NO: 2937 - RNA, 19 nt, Influenza A virus
uguuaaagcacagauuuga

SEQ ID NO: 2938 - RNA, 19 nt, Influenza A virus
ggaauggagaugagacguu

SEQ ID NO: 2939 - RNA, 19 nt, Influenza A virus
ugaagaaaaauuugaaauc

SEQ ID NO: 2940 - RNA, 19 nt, Influenza A virus
aagacccaagucacgaagg

SEQ ID NO: 2941 - RNA, 19 nt, Influenza A virus
gcagcaauggacgauuuuc

SEQ ID NO: 2942 - RNA, 19 nt, Influenza A virus
agaugagacguugccuccu

SEQ ID NO: 2943 - RNA, 19 nt, Influenza A virus
gucaaaccacacgaaaagg

SEQ ID NO: 2944 - RNA, 19 nt, Influenza A virus
cagcaauggacgauuuuca

SEQ ID NO: 2945 - RNA, 19 nt, Influenza A virus
ugcagcaauggacgauuuu

SEQ ID NO: 2946 - RNA, 19 nt, Influenza A virus
gggaauggagaugagacgu

SEQ ID NO: 2947 - RNA, 19 nt, Influenza A virus
augcacuguuaaagcacag

SEQ ID NO: 2948 - RNA, 19 nt, Influenza A virus
cuguuaaagcacagauuug

SEQ ID NO: 2949 - RNA, 19 nt, Influenza A virus
aaugcacuguuaaagcaca

SEQ ID NO: 2950 - RNA, 19 nt, Influenza A virus
aauggagaugagacguugc

SEQ ID NO: 2951 - RNA, 19 nt, Influenza A virus
aaaugcacuguuaaagcac

SEQ ID NO: 2952 - RNA, 19 nt, Influenza A virus
acuguuaaagcacagauuu

SEQ ID NO: 2953 - RNA, 19 nt, Influenza A virus
ccaaaugcacuguuaaagc

SEQ ID NO: 2954 - RNA, 19 nt, Influenza A virus
ugaagacccaagucacgaa

SEQ ID NO: 2955 - RNA, 19 nt, Influenza A virus
gcacuguuaaagcacagau

SEQ ID NO: 2956 - RNA, 19 nt, Influenza A virus
caaaugcacuguuaaagca

SEQ ID NO: 2957 - RNA, 19 nt, Influenza A virus
cacuguuaaagcacagauu

SEQ ID NO: 2958 - RNA, 19 nt, Influenza A virus
uucaucaaugaacaaggcg

SEQ ID NO: 2959 - RNA, 19 nt, Influenza A virus
ugcacuguuaaagcacaga

SEQ ID NO: 2960 - RNA, 19 nt, Influenza A virus
ucaucaaugaacaaggcga

SEQ ID NO: 2961 - RNA, 19 nt, Influenza A virus
auguuucauguauucagau

SEQ ID NO: 2962 - RNA, 19 nt, Influenza A virus
uccaaaugcacuguuaaag

SEQ ID NO: 2963 - RNA, 19 nt, Influenza A virus
gggaggaaauggccacaaa

SEQ ID NO: 2964 - RNA, 19 nt, Influenza A virus
caaaggcagacuacacucu

SEQ ID NO: 2965 - RNA, 19 nt, Influenza A virus
ggggaggaaauggccacaa

SEQ ID NO: 2966 - RNA, 19 nt, Influenza A virus
uauguuucauguauucaga

SEQ ID NO: 2967 - RNA, 19 nt, Influenza A virus
ggaggaaauggccacaaag

SEQ ID NO: 2968 - RNA, 19 nt, Influenza A virus
guauguuucauguauucag

SEQ ID NO: 2969 - RNA, 19 nt, Influenza A virus
acuggggaggaaauggcca

SEQ ID NO: 2970 - RNA, 19 nt, Influenza A virus
uuucaucaaugaacaaggc

SEQ ID NO: 2971 - RNA, 19 nt, Influenza A virus
gacaacaccaagaccaauc

SEQ ID NO: 2972 - RNA, 19 nt, Influenza A virus
cuggggaggaaauggccac

SEQ ID NO: 2973 - RNA, 19 nt, Influenza A virus
agcaauggacgauuuucaa

SEQ ID NO: 2974 - RNA, 19 nt, Influenza A virus
uggggaggaaauggccaca

SEQ ID NO: 2975 - RNA, 19 nt, Influenza A virus
augauaagcaagugcagaa

SEQ ID NO: 2976 - RNA, 19 nt, Influenza A virus
aauuauuucacagcagagg

SEQ ID NO: 2977 - RNA, 19 nt, Influenza A virus
guuaaagcacagauuugaa

SEQ ID NO: 2978 - RNA, 19 nt, Influenza A virus
aaaacaugaagaaaacgag

SEQ ID NO: 2979 - RNA, 19 nt, Influenza A virus
aaaaacaugaagaaaacga

SEQ ID NO: 2980 - RNA, 19 nt, Influenza A virus
acaugaagaaaacgaguca

SEQ ID NO: 2981 - RNA, 19 nt, Influenza A virus
auuauuucacagcagaggu

SEQ ID NO: 2982 - RNA, 19 nt, Influenza A virus
ucaaaaugaaauggggaau

SEQ ID NO: 2983 - RNA, 19 nt, Influenza A virus
aaacaugaagaaaacgagu

SEQ ID NO: 2984 - RNA, 19 nt, Influenza A virus
ugauaagcaagugcagaac

SEQ ID NO: 2985 - RNA, 19 nt, Influenza A virus
aacaugaagaaaacgaguc

SEQ ID NO: 2986 - RNA, 19 nt, Influenza A virus
caaaaugaaauggggaaug

SEQ ID NO: 2987 - RNA, 19 nt, Influenza A virus
augauccaaaugcacuguu

SEQ ID NO: 2988 - RNA, 19 nt, Influenza A virus
aggaauuauuucacagcag

SEQ ID NO: 2989 - RNA, 19 nt, Influenza A virus
gaauuauuucacagcagag

SEQ ID NO: 2990 - RNA, 19 nt, Influenza A virus
ggaauuauuucacagcaga

SEQ ID NO: 2991 - RNA, 19 nt, Influenza A virus
gaugauccaaaugcacugu

SEQ ID NO: 2992 - RNA, 19 nt, Influenza A virus
aaagcagggcuaggauuaa

SEQ ID NO: 2993 - RNA, 19 nt, Influenza A virus
guuguucaggcucuuaggg

SEQ ID NO: 2994 - RNA, 19 nt, Influenza A virus
augaggaggaauuauuuca

SEQ ID NO: 2995 - RNA, 19 nt, Influenza A virus
ugaggaggaauuauuucac

SEQ ID NO: 2996 - RNA, 19 nt, Influenza A virus
gauaagcaagugcagaacu

SEQ ID NO: 2997 - RNA, 19 nt, Influenza A virus
uuaaagagaaagacaugac

SEQ ID NO: 2998 - RNA, 19 nt, Influenza A virus
gaaagcagggcuaggauua

SEQ ID NO: 2999 - RNA, 19 nt, Influenza A virus
uaagcaagugcagaacuaa

SEQ ID NO: 3000 - RNA, 19 nt, Influenza A virus
ugauccaaaugcacuguua

SEQ ID NO: 3001 - RNA, 19 nt, Influenza A virus
uacauugcaagcaugagga

SEQ ID NO: 3002 - RNA, 19 nt, Influenza A virus
agcaagugcagaacuaaag

SEQ ID NO: 3003 - RNA, 19 nt, Influenza A virus
uaaagagaaagacaugacc

SEQ ID NO: 3004 - RNA, 19 nt, Influenza A virus
gcaagugcagaacuaaaga

SEQ ID NO: 3005 - RNA, 19 nt, Influenza A virus
auaagcaagugcagaacua

SEQ ID NO: 3006 - RNA, 19 nt, Influenza A virus
aagcaagugcagaacuaaa

SEQ ID NO: 3007 - RNA, 19 nt, Influenza A virus
uucacauuuucucauucac

SEQ ID NO: 3008 - RNA, 19 nt, Influenza A virus
auuucacagcagagguguc

SEQ ID NO: 3009 - RNA, 19 nt, Influenza A virus
aagugcagaacuaaagagg

SEQ ID NO: 3010 - RNA, 19 nt, Influenza A virus
agugcagaacuaaagaggg

SEQ ID NO: 3011 - RNA, 19 nt, Influenza A virus
gugcagaacuaaagaggga

SEQ ID NO: 3012 - RNA, 19 nt, Influenza A virus
cuuguuguucaggcucuua

SEQ ID NO: 3013 - RNA, 19 nt, Influenza A virus
uauuucacagcagaggugu

SEQ ID NO: 3014 - RNA, 19 nt, Influenza A virus
caagugcagaacuaaagag

SEQ ID NO: 3015 - RNA, 19 nt, Influenza A virus
uuguuguucaggcucuuag

SEQ ID NO: 3016 - RNA, 19 nt, Influenza A virus
gggagagacagaacaaugg

SEQ ID NO: 3017 - RNA, 19 nt, Influenza A virus
caaaccacacgaaaaggga

SEQ ID NO: 3018 - RNA, 19 nt, Influenza A virus
ggauacagaaugaguucaa

SEQ ID NO: 3019 - RNA, 19 nt, Influenza A virus
ucacauuuucucauucacu

SEQ ID NO: 3020 - RNA, 19 nt, Influenza A virus
uggauacagaaugaguuca

SEQ ID NO: 3021 - RNA, 19 nt, Influenza A virus
ggagagacagaacaauggc

SEQ ID NO: 3022 - RNA, 19 nt, Influenza A virus
gaacaauggccuggacagu

SEQ ID NO: 3023 - RNA, 19 nt, Influenza A virus
caagcuggauacagaauga

SEQ ID NO: 3024 - RNA, 19 nt, Influenza A virus
uacagaaugaguucaacaa

SEQ ID NO: 3025 - RNA, 19 nt, Influenza A virus
agcaugaggaggaauuauu

SEQ ID NO: 3026 - RNA, 19 nt, Influenza A virus
auacagaaugaguucaaca

SEQ ID NO: 3027 - RNA, 19 nt, Influenza A virus
aggggagagacagaacaau

SEQ ID NO: 3028 - RNA, 19 nt, Influenza A virus
gaggggagagacagaacaa

SEQ ID NO: 3029 - RNA, 19 nt, Influenza A virus
ggggagagacagaacaaug

SEQ ID NO: 3030 - RNA, 19 nt, Influenza A virus
gcaugaggaggaauuauuu

SEQ ID NO: 3031 - RNA, 19 nt, Influenza A virus
ucaagcuggauacagaaug

SEQ ID NO: 3032 - RNA, 19 nt, Influenza A virus
uguuguucaggcucuuagg

SEQ ID NO: 3033 - RNA, 19 nt, Influenza A virus
uuauuucacagcagaggug

SEQ ID NO: 3034 - RNA, 19 nt, Influenza A virus
gauacagaaugaguucaac

SEQ ID NO: 3035 - RNA, 19 nt, Influenza A virus
auucacauuuucucauuca

SEQ ID NO: 3036 - RNA, 19 nt, Influenza A virus
acagcagaggugucccauu

SEQ ID NO: 3037 - RNA, 19 nt, Influenza A virus
cagcagaggugucccauug

SEQ ID NO: 3038 - RNA, 19 nt, Influenza A virus
cacacauucacauuuucuc

SEQ ID NO: 3039 - RNA, 19 nt, Influenza A virus
aagcaugaggaggaauuau

SEQ ID NO: 3040 - RNA, 19 nt, Influenza A virus
cuggauacagaaugaguuc

SEQ ID NO: 3041 - RNA, 19 nt, Influenza A virus
cauucacauuuucucauuc

SEQ ID NO: 3042 - RNA, 19 nt, Influenza A virus
acacacauucacauuuucu

SEQ ID NO: 3043 - RNA, 19 nt, Influenza A virus
caugaggaggaauuauuuc

SEQ ID NO: 3044 - RNA, 19 nt, Influenza A virus
agacccaagucacgaagga

SEQ ID NO: 3045 - RNA, 19 nt, Influenza A virus
acauucacauuuucucauu

SEQ ID NO: 3046 - RNA, 19 nt, Influenza A virus
cacagcagaggugucccau

SEQ ID NO: 3047 - RNA, 19 nt, Influenza A virus
acacauucacauuuucuca

SEQ ID NO: 3048 - RNA, 19 nt, Influenza A virus
gcuggauacagaaugaguu

SEQ ID NO: 3049 - RNA, 19 nt, Influenza A virus
accaagaccaaucaaacuu

SEQ ID NO: 3050 - RNA, 19 nt, Influenza A virus
aagcuggauacagaaugag

SEQ ID NO: 3051 - RNA, 19 nt, Influenza A virus
agcuggauacagaaugagu

SEQ ID NO: 3052 - RNA, 19 nt, Influenza A virus
uuucacagcagaggugucc

SEQ ID NO: 3053 - RNA, 19 nt, Influenza A virus
cacauucacauuuucucau

SEQ ID NO: 3054 - RNA, 19 nt, Influenza A virus
ccaagaccaaucaaacuuc

SEQ ID NO: 3055 - RNA, 19 nt, Influenza A virus
gaucccuggguuuugcuca

SEQ ID NO: 3056 - RNA, 19 nt, Influenza A virus
ccuggguuuugcucaaugc

SEQ ID NO: 3057 - RNA, 19 nt, Influenza A virus
ugaucccuggguuuugcuc

SEQ ID NO: 3058 - RNA, 19 nt, Influenza A virus
cauaaugaaggggguauac

SEQ ID NO: 3059 - RNA, 19 nt, Influenza A virus
acauaaugaaggggguaua

SEQ ID NO: 3060 - RNA, 19 nt, Influenza A virus
cccuggguuuugcucaaug

SEQ ID NO: 3061 - RNA, 19 nt, Influenza A virus
aucccuggguuuugcucaa

SEQ ID NO: 3062 - RNA, 19 nt, Influenza A virus
acagaaugaguucaacaag

SEQ ID NO: 3063 - RNA, 19 nt, Influenza A virus
caagaccaaucaaacuucc

SEQ ID NO: 3064 - RNA, 19 nt, Influenza A virus
uacauaaugaaggggguau

SEQ ID NO: 3065 - RNA, 19 nt, Influenza A virus
ucccuggguuuugcucaau

SEQ ID NO: 3066 - RNA, 19 nt, Influenza A virus
agagacagaacaauggccu

SEQ ID NO: 3067 - RNA, 19 nt, Influenza A virus
agacagaacaauggccugg

SEQ ID NO: 3068 - RNA, 19 nt, Influenza A virus
acagaacaauggccuggac

SEQ ID NO: 3069 - RNA, 19 nt, Influenza A virus
ugauugucgaacuugcaga

SEQ ID NO: 3070 - RNA, 19 nt, Influenza A virus
gagacagaacaauggccug

SEQ ID NO: 3071 - RNA, 19 nt, Influenza A virus
augauugucgaacuugcag

SEQ ID NO: 3072 - RNA, 19 nt, Influenza A virus
gacagaacaauggccugga

SEQ ID NO: 3073 - RNA, 19 nt, Influenza A virus
uaaaaacaugaagaaaacg

SEQ ID NO: 3074 - RNA, 19 nt, Influenza A virus
gagagacagaacaauggcc

SEQ ID NO: 3075 - RNA, 19 nt, Influenza A virus
aaacaauugaagaaaaauu

SEQ ID NO: 3076 - RNA, 19 nt, Influenza A virus
aacaauugaagaaaaauuu

SEQ ID NO: 3077 - RNA, 19 nt, Influenza A virus
gaggaggaauuauuucaca

SEQ ID NO: 3078 - RNA, 19 nt, Influenza A virus
gaaacaauugaagaaaaau

SEQ ID NO: 3079 - RNA, 19 nt, Influenza A virus
gagaaaguagacuuugaca

SEQ ID NO: 3080 - RNA, 19 nt, Influenza A virus
aggaggaauuauuucacag

SEQ ID NO: 3081 - RNA, 19 nt, Influenza A virus
ggaggaauuauuucacagc

SEQ ID NO: 3082 - RNA, 19 nt, Influenza A virus
agaacaauggccuggacag

SEQ ID NO: 3083 - RNA, 19 nt, Influenza A virus
cagaacaauggccuggaca

SEQ ID NO: 3084 - RNA, 19 nt, Influenza A virus
gaaccugggaccuuugauc

SEQ ID NO: 3085 - RNA, 19 nt, Influenza A virus
auaugaugcgaucaagugc

SEQ ID NO: 3086 - RNA, 19 nt, Influenza A virus
cuuucaagcuggauacaga

SEQ ID NO: 3087 - RNA, 19 nt, Influenza A virus
uaugaugcgaucaagugca

SEQ ID NO: 3088 - RNA, 19 nt, Influenza A virus
augaugcgaucaagugcau

SEQ ID NO: 3089 - RNA, 19 nt, Influenza A virus
gauucaucgaaauuggagu

SEQ ID NO: 3090 - RNA, 19 nt, Influenza A virus
aaccugggaccuuugaucu

SEQ ID NO: 3091 - RNA, 19 nt, Influenza A virus
agaaacaauugaagaaaaa

SEQ ID NO: 3092 - RNA, 19 nt, Influenza A virus
aagaaacaauugaagaaaa

SEQ ID NO: 3093 - RNA, 19 nt, Influenza A virus
gaggaauuauuucacagca

SEQ ID NO: 3094 - RNA, 19 nt, Influenza A virus
cacuuucaagcuggauaca

SEQ ID NO: 3095 - RNA, 19 nt, Influenza A virus
ucacuuucaagcuggauac

SEQ ID NO: 3096 - RNA, 19 nt, Influenza A virus
gaugauugucgaacuugca

SEQ ID NO: 3097 - RNA, 19 nt, Influenza A virus
agaaaguagacuuugacaa

SEQ ID NO: 3098 - RNA, 19 nt, Influenza A virus
ccacaaaggcagacuacac

SEQ ID NO: 3099 - RNA, 19 nt, Influenza A virus
acuuucaagcuggauacag

SEQ ID NO: 3100 - RNA, 19 nt, Influenza A virus
gaaauggccacaaaggcag

SEQ ID NO: 3101 - RNA, 19 nt, Influenza A virus
auggccacaaaggcagacu

SEQ ID NO: 3102 - RNA, 19 nt, Influenza A virus
gccacaaaggcagacuaca

SEQ ID NO: 3103 - RNA, 19 nt, Influenza A virus
aaaguagacuuugacaacu

SEQ ID NO: 3104 - RNA, 19 nt, Influenza A virus
gagguauguuucauguauu

SEQ ID NO: 3105 - RNA, 19 nt, Influenza A virus
acaaaggcagacuacacuc

SEQ ID NO: 3106 - RNA, 19 nt, Influenza A virus
uggccacaaaggcagacua

SEQ ID NO: 3107 - RNA, 19 nt, Influenza A virus
uucaagcuggauacagaau

SEQ ID NO: 3108 - RNA, 19 nt, Influenza A virus
agguauguuucauguauuc

SEQ ID NO: 3109 - RNA, 19 nt, Influenza A virus
aaguagacuuugacaacug

SEQ ID NO: 3110 - RNA, 19 nt, Influenza A virus
aaauggccacaaaggcaga

SEQ ID NO: 3111 - RNA, 19 nt, Influenza A virus
aaauggaagauuuugugcg

SEQ ID NO: 3112 - RNA, 19 nt, Influenza A virus
uuucaagcuggauacagaa

SEQ ID NO: 3113 - RNA, 19 nt, Influenza A virus
ggagguauguuucauguau

SEQ ID NO: 3114 - RNA, 19 nt, Influenza A virus
gguauguuucauguauuca

SEQ ID NO: 3115 - RNA, 19 nt, Influenza A virus
ggccacaaaggcagacuac

SEQ ID NO: 3116 - RNA, 19 nt, Influenza A virus
uggagguauguuucaugua

SEQ ID NO: 3117 - RNA, 19 nt, Influenza A virus
cacaaaggcagacuacacu

SEQ ID NO: 3118 - RNA, 19 nt, Influenza A virus
aauggaagauuuugugcga

SEQ ID NO: 3119 - RNA, 19 nt, Influenza A virus
agagaaaguagacuuugac

SEQ ID NO: 3120 - RNA, 19 nt, Influenza A virus
gaaaguagacuuugacaac

SEQ ID NO: 3121 - RNA, 19 nt, Influenza A virus
aauggccacaaaggcagac

SEQ ID NO: 3122 - RNA, 19 nt, Influenza A virus
gucacuuucaagcuggaua

SEQ ID NO: 3123 - RNA, 19 nt, Influenza A virus
uucaacccgaugauugucg

SEQ ID NO: 3124 - RNA, 19 nt, Influenza A virus
ucaggcucuuagggacaac

SEQ ID NO: 3125 - RNA, 19 nt, Influenza A virus
caggcucuuagggacaacc

SEQ ID NO: 3126 - RNA, 19 nt, Influenza A virus
ccauugggaaagucuguag

SEQ ID NO: 3127 - RNA, 19 nt, Influenza A virus
aggcucuuagggacaaccu

SEQ ID NO: 3128 - RNA, 19 nt, Influenza A virus
ucaacccgaugauugucga

SEQ ID NO: 3129 - RNA, 19 nt, Influenza A virus
uccauugggaaagucugua

SEQ ID NO: 3130 - RNA, 19 nt, Influenza A virus
acauauauuaccuugaaaa

SEQ ID NO: 3131 - RNA, 19 nt, Influenza A virus
cauugggaaagucuguagg

SEQ ID NO: 3132 - RNA, 19 nt, Influenza A virus
uugggaaagucuguaggac

SEQ ID NO: 3133 - RNA, 19 nt, Influenza A virus
auugggaaagucuguagga

SEQ ID NO: 3134 - RNA, 19 nt, Influenza A virus
cacauauauuaccuugaaa

SEQ ID NO: 3135 - RNA, 19 nt, Influenza A virus
uccacauauauuaccuuga

SEQ ID NO: 3136 - RNA, 19 nt, Influenza A virus
ccacauauauuaccuugaa

SEQ ID NO: 3137 - RNA, 19 nt, Influenza A virus
uagaacuugaugauccaaa

SEQ ID NO: 3138 - RNA, 19 nt, Influenza A virus
uuugcagcaauaugcacuc

SEQ ID NO: 3139 - RNA, 19 nt, Influenza A virus
uugcagcaauaugcacuca

SEQ ID NO: 3140 - RNA, 19 nt, Influenza A virus
auuugcagcaauaugcacu

SEQ ID NO: 3141 - RNA, 19 nt, Influenza A virus
aaguccacauauauuaccu

SEQ ID NO: 3142 - RNA, 19 nt, Influenza A virus
uugucgaacuugcagaaaa

SEQ ID NO: 3143 - RNA, 19 nt, Influenza A virus
gaaguccacauauauuacc

SEQ ID NO: 3144 - RNA, 19 nt, Influenza A virus
gaacuugaugauccaaaug

SEQ ID NO: 3145 - RNA, 19 nt, Influenza A virus
guagaacuugaugauccaa

SEQ ID NO: 3146 - RNA, 19 nt, Influenza A virus
aacuugaugauccaaaugc

SEQ ID NO: 3147 - RNA, 19 nt, Influenza A virus
ggaaauggccacaaaggca

SEQ ID NO: 3148 - RNA, 19 nt, Influenza A virus
gauugucgaacuugcagaa

SEQ ID NO: 3149 - RNA, 19 nt, Influenza A virus
auugucgaacuugcagaaa

SEQ ID NO: 3150 - RNA, 19 nt, Influenza A virus
agaacuugaugauccaaau

SEQ ID NO: 3151 - RNA, 19 nt, Influenza A virus
acuugaugauccaaaugca

SEQ ID NO: 3152 - RNA, 19 nt, Influenza A virus
aacaauggccuggacagua

SEQ ID NO: 3153 - RNA, 19 nt, Influenza A virus
ugcagcaauaugcacucac

SEQ ID NO: 3154 - RNA, 19 nt, Influenza A virus
guccacauauauuaccuug

SEQ ID NO: 3155 - RNA, 19 nt, Influenza A virus
caucaaugaacaaggcgaa

SEQ ID NO: 3156 - RNA, 19 nt, Influenza A virus
aguccacauauauuaccuu

SEQ ID NO: 3157 - RNA, 19 nt, Influenza A virus
agauucaucgaaauuggag

SEQ ID NO: 3158 - RNA, 19 nt, Influenza A virus
aucaaugaacaaggcgaau

SEQ ID NO: 3159 - RNA, 19 nt, Influenza A virus
accaauuuauauggauuca

SEQ ID NO: 3160 - RNA, 19 nt, Influenza A virus
ccaauuuauauggauucau

SEQ ID NO: 3161 - RNA, 19 nt, Influenza A virus
caauuuauauggauucauc

SEQ ID NO: 3162 - RNA, 19 nt, Influenza A virus
ucaaugaacaaggcgaauc

SEQ ID NO: 3163 - RNA, 19 nt, Influenza A virus
acccgaugauugucgaacu

SEQ ID NO: 3164 - RNA, 19 nt, Influenza A virus
aacccgaugauugucgaac

SEQ ID NO: 3165 - RNA, 19 nt, Influenza A virus
aaugaacaaggcgaaucaa

SEQ ID NO: 3166 - RNA, 19 nt, Influenza A virus
caacccgaugauugucgaa

SEQ ID NO: 3167 - RNA, 19 nt, Influenza A virus
augaacaaggcgaaucaau

SEQ ID NO: 3168 - RNA, 19 nt, Influenza A virus
aaaauugaaccuuuucuga

SEQ ID NO: 3169 - RNA, 19 nt, Influenza A virus
cccgaugauugucgaacuu

SEQ ID NO: 3170 - RNA, 19 nt, Influenza A virus
ugaacaaggcgaaucaaua

SEQ ID NO: 3171 - RNA, 19 nt, Influenza A virus
caaugaacaaggcgaauca

SEQ ID NO: 3172 - RNA, 19 nt, Influenza A virus
uuugagaauaaaucagaag

SEQ ID NO: 3173 - RNA, 19 nt, Influenza A virus
uugaaacaaacaaauuugc

SEQ ID NO: 3174 - RNA, 19 nt, Influenza A virus
auugaaacaaacaaauuug

SEQ ID NO: 3175 - RNA, 19 nt, Influenza A virus
aaaaccaauuuauauggau

SEQ ID NO: 3176 - RNA, 19 nt, Influenza A virus
uugagaauaaaucagaagc

SEQ ID NO: 3177 - RNA, 19 nt, Influenza A virus
aaauugaaacaaacaaauu

SEQ ID NO: 3178 - RNA, 19 nt, Influenza A virus
ugggaaagucuguaggacu

SEQ ID NO: 3179 - RNA, 19 nt, Influenza A virus
aaaccaauuuauauggauu

SEQ ID NO: 3180 - RNA, 19 nt, Influenza A virus
aaaauugaaacaaacaaau

SEQ ID NO: 3181 - RNA, 19 nt, Influenza A virus
aaccaauuuauauggauuc

SEQ ID NO: 3182 - RNA, 19 nt, Influenza A virus
ugaaacaaacaaauuugca

SEQ ID NO: 3183 - RNA, 19 nt, Influenza A virus
aauugaaacaaacaaauuu

SEQ ID NO: 3184 - RNA, 19 nt, Influenza A virus
ugguucaacuccuuccuga

SEQ ID NO: 3185 - RNA, 19 nt, Influenza A virus
agcucgaugaaauuggaga

SEQ ID NO: 3186 - RNA, 19 nt, Influenza A virus
gagcucgaugaaauuggag

SEQ ID NO: 3187 - RNA, 19 nt, Influenza A virus
aucgagagcaugauugaag

SEQ ID NO: 3188 - RNA, 19 nt, Influenza A virus
uggauagagcucgaugaaa

SEQ ID NO: 3189 - RNA, 19 nt, Influenza A virus
ggauagagcucgaugaaau

SEQ ID NO: 3190 - RNA, 19 nt, Influenza A virus
aaucagaagcauggcccau

SEQ ID NO: 3191 - RNA, 19 nt, Influenza A virus
aaaucagaagcauggccca

SEQ ID NO: 3192 - RNA, 19 nt, Influenza A virus
ucaaauguccaaagaagug

SEQ ID NO: 3193 - RNA, 19 nt, Influenza A virus
ugcagagacauaagcgauu

SEQ ID NO: 3194 - RNA, 19 nt, Influenza A virus
uugugagcauggaguuuuc

SEQ ID NO: 3195 - RNA, 19 nt, Influenza A virus
auagagcucgaugaaauug

SEQ ID NO: 3196 - RNA, 19 nt, Influenza A virus
ucgagagcaugauugaagc

SEQ ID NO: 3197 - RNA, 19 nt, Influenza A virus
aaaggcagacuacacucuc

SEQ ID NO: 3198 - RNA, 19 nt, Influenza A virus
aaaaaccaauuuauaugga

SEQ ID NO: 3199 - RNA, 19 nt, Influenza A virus
gcagagacauaagcgauuu

SEQ ID NO: 3200 - RNA, 19 nt, Influenza A virus
uagagcucgaugaaauugg

SEQ ID NO: 3201 - RNA, 19 nt, Influenza A virus
uuugugagcauggaguuuu

SEQ ID NO: 3202 - RNA, 19 nt, Influenza A virus
agagcucgaugaaauugga

SEQ ID NO: 3203 - RNA, 19 nt, Influenza A virus
gauagagcucgaugaaauu

SEQ ID NO: 3204 - RNA, 19 nt, Influenza A virus
cuuggugaaaacauggcac

SEQ ID NO: 3205 - RNA, 19 nt, Influenza A virus
cagagacauaagcgauuug

SEQ ID NO: 3206 - RNA, 19 nt, Influenza A virus
cagaagcauggcccauugg

SEQ ID NO: 3207 - RNA, 19 nt, Influenza A virus
aggcagacuacacucucga

SEQ ID NO: 3208 - RNA, 19 nt, Influenza A virus
ucagaagcauggcccauug

SEQ ID NO: 3209 - RNA, 19 nt, Influenza A virus
gaagcauggcccauugggg

SEQ ID NO: 3210 - RNA, 19 nt, Influenza A virus
aaggcagacuacacucucg

SEQ ID NO: 3211 - RNA, 19 nt, Influenza A virus
aagcauggcccauugggga

SEQ ID NO: 3212 - RNA, 19 nt, Influenza A virus
aaaauuugaaaucucagga

SEQ ID NO: 3213 - RNA, 19 nt, Influenza A virus
auauuaccuugaaaaggcc

SEQ ID NO: 3214 - RNA, 19 nt, Influenza A virus
aucagaagcauggcccauu

SEQ ID NO: 3215 - RNA, 19 nt, Influenza A virus
cuggauagagcucgaugaa

SEQ ID NO: 3216 - RNA, 19 nt, Influenza A virus
gauuuguaugauuacaagg

SEQ ID NO: 3217 - RNA, 19 nt, Influenza A virus
agaagcauggcccauuggg

SEQ ID NO: 3218 - RNA, 19 nt, Influenza A virus
ugcaacacuacuggagcug

SEQ ID NO: 3219 - RNA, 19 nt, Influenza A virus
auauauuaccuugaaaagg

SEQ ID NO: 3220 - RNA, 19 nt, Influenza A virus
ccagauuuguaugauuaca

SEQ ID NO: 3221 - RNA, 19 nt, Influenza A virus
uauuaccuugaaaaggcca

SEQ ID NO: 3222 - RNA, 19 nt, Influenza A virus
uuggugaaaacauggcacc

SEQ ID NO: 3223 - RNA, 19 nt, Influenza A virus
gugaaaacauggcaccaga

SEQ ID NO: 3224 - RNA, 19 nt, Influenza A virus
auuuguaugauuacaagga

SEQ ID NO: 3225 - RNA, 19 nt, Influenza A virus
gaaaaauuugaaaucucag

SEQ ID NO: 3226 - RNA, 19 nt, Influenza A virus
aaaaauuugaaaucucagg

SEQ ID NO: 3227 - RNA, 19 nt, Influenza A virus
ggugaaaacauggcaccag

SEQ ID NO: 3228 - RNA, 19 nt, Influenza A virus
cauauauuaccuugaaaag

SEQ ID NO: 3229 - RNA, 19 nt, Influenza A virus
uauauuaccuugaaaaggc

SEQ ID NO: 3230 - RNA, 19 nt, Influenza A virus
cagauuuguaugauuacaa

SEQ ID NO: 3231 - RNA, 19 nt, Influenza A virus
gcuucaacccgaugauugu

SEQ ID NO: 3232 - RNA, 19 nt, Influenza A virus
acaguaucugcaacacuac

SEQ ID NO: 3233 - RNA, 19 nt, Influenza A virus
aacuccuuccugacacaug

SEQ ID NO: 3234 - RNA, 19 nt, Influenza A virus
aacaguaucugcaacacua

SEQ ID NO: 3235 - RNA, 19 nt, Influenza A virus
agauuuguaugauuacaag

SEQ ID NO: 3236 - RNA, 19 nt, Influenza A virus
uauauagucaaaccacacg

SEQ ID NO: 3237 - RNA, 19 nt, Influenza A virus
auauagucaaaccacacga

SEQ ID NO: 3238 - RNA, 19 nt, Influenza A virus
agcauggcccauuggggag

SEQ ID NO: 3239 - RNA, 19 nt, Influenza A virus
gaagaaaaauuugaaaucu

SEQ ID NO: 3240 - RNA, 19 nt, Influenza A virus
uggugaaaacauggcacca

SEQ ID NO: 3241 - RNA, 19 nt, Influenza A virus
cugcagagacauaagcgau

SEQ ID NO: 3242 - RNA, 19 nt, Influenza A virus
ugcuucaacccgaugauug

SEQ ID NO: 3243 - RNA, 19 nt, Influenza A virus
aagaaaaauuugaaaucuc

SEQ ID NO: 3244 - RNA, 19 nt, Influenza A virus
agaaaaauuugaaaucuca

SEQ ID NO: 3245 - RNA, 19 nt, Influenza A virus
acuccuuccugacacaugc

SEQ ID NO: 3246 - RNA, 19 nt, Influenza A virus
uucaacuccuuccugacac

SEQ ID NO: 3247 - RNA, 19 nt, Influenza A virus
guucaacuccuuccugaca

SEQ ID NO: 3248 - RNA, 19 nt, Influenza A virus
gcauggcccauuggggagu

SEQ ID NO: 3249 - RNA, 19 nt, Influenza A virus
ugaaaacauggcaccagag

SEQ ID NO: 3250 - RNA, 19 nt, Influenza A virus
guaaacaguaucugcaaca

SEQ ID NO: 3251 - RNA, 19 nt, Influenza A virus
aaaacauggcaccagagaa

SEQ ID NO: 3252 - RNA, 19 nt, Influenza A virus
caacuccuuccugacacau

SEQ ID NO: 3253 - RNA, 19 nt, Influenza A virus
ucaacuccuuccugacaca

SEQ ID NO: 3254 - RNA, 19 nt, Influenza A virus
gguucaacuccuuccugac

SEQ ID NO: 3255 - RNA, 19 nt, Influenza A virus
gaaaacauggcaccagaga

SEQ ID NO: 3256 - RNA, 19 nt, Influenza A virus
uugguucaacuccuuccug

SEQ ID NO: 3257 - RNA, 19 nt, Influenza A virus
uaaacaguaucugcaacac

SEQ ID NO: 3258 - RNA, 19 nt, Influenza A virus
aaacaguaucugcaacacu

SEQ ID NO: 3259 - RNA, 19 nt, Influenza A virus
gugcgacaaugcuucaacc

SEQ ID NO: 3260 - RNA, 19 nt, Influenza A virus
cuucaacccgaugauuguc

SEQ ID NO: 3261 - RNA, 19 nt, Influenza A virus
cucgacgaggaaagcaggg

SEQ ID NO: 3262 - RNA, 19 nt, Influenza A virus
aauuugaaaucucaggaac

SEQ ID NO: 3263 - RNA, 19 nt, Influenza A virus
ucgacgaggaaagcagggc

SEQ ID NO: 3264 - RNA, 19 nt, Influenza A virus
ugcgacaaugcuucaaccc

SEQ ID NO: 3265 - RNA, 19 nt, Influenza A virus
aaauuugaaaucucaggaa

SEQ ID NO: 3266 - RNA, 19 nt, Influenza A virus
aaacauggcaccagagaaa

SEQ ID NO: 3267 - RNA, 19 nt, Influenza A virus
cuccuuccugacacaugca

SEQ ID NO: 3268 - RNA, 19 nt, Influenza A virus
cucucgacgaggaaagcag

SEQ ID NO: 3269 - RNA, 19 nt, Influenza A virus
gcagacuacacucucgacg

SEQ ID NO: 3270 - RNA, 19 nt, Influenza A virus
acucucgacgaggaaagca

SEQ ID NO: 3271 - RNA, 19 nt, Influenza A virus
ugugcgacaaugcuucaac

SEQ ID NO: 3272 - RNA, 19 nt, Influenza A virus
cagacuacacucucgacga

SEQ ID NO: 3273 - RNA, 19 nt, Influenza A virus
aacugcagagacauaagcg

SEQ ID NO: 3274 - RNA, 19 nt, Influenza A virus
auagucaaaccacacgaaa

SEQ ID NO: 3275 - RNA, 19 nt, Influenza A virus
acugcagagacauaagcga

SEQ ID NO: 3276 - RNA, 19 nt, Influenza A virus
uauagucaaaccacacgaa

SEQ ID NO: 3277 - RNA, 19 nt, Influenza A virus
cacucucgacgaggaaagc

SEQ ID NO: 3278 - RNA, 19 nt, Influenza A virus
ggcagacuacacucucgac

SEQ ID NO: 3279 - RNA, 19 nt, Influenza A virus
uacacucucgacgaggaaa

SEQ ID NO: 3280 - RNA, 19 nt, Influenza A virus
acacucucgacgaggaaag

SEQ ID NO: 3281 - RNA, 19 nt, Influenza A virus
acagauucaucgaaauugg

SEQ ID NO: 3282 - RNA, 19 nt, Influenza A virus
ugggcucuuggugaaaaca

SEQ ID NO: 3283 - RNA, 19 nt, Influenza A virus
ugaaaucucaggaacuaug

SEQ ID NO: 3284 - RNA, 19 nt, Influenza A virus
uagucaaaccacacgaaaa

SEQ ID NO: 3285 - RNA, 19 nt, Influenza A virus
ucuuggugaaaacauggca

SEQ ID NO: 3286 - RNA, 19 nt, Influenza A virus
auuaccuugaaaaggccaa

SEQ ID NO: 3287 - RNA, 19 nt, Influenza A virus
gaaaucucaggaacuaugc

SEQ ID NO: 3288 - RNA, 19 nt, Influenza A virus
ucucgacgaggaaagcagg

SEQ ID NO: 3289 - RNA, 19 nt, Influenza A virus
acugaguacauaaugaagg

SEQ ID NO: 3290 - RNA, 19 nt, Influenza A virus
aacagauucaucgaaauug

SEQ ID NO: 3291 - RNA, 19 nt, Influenza A virus
uuugaaaucucaggaacua

SEQ ID NO: 3292 - RNA, 19 nt, Influenza A virus
cugaguacauaaugaaggg

SEQ ID NO: 3293 - RNA, 19 nt, Influenza A virus
uugaaaucucaggaacuau

SEQ ID NO: 3294 - RNA, 19 nt, Influenza A virus
auuugaaaucucaggaacu

SEQ ID NO: 3295 - RNA, 19 nt, Influenza A virus
auaaaucagaagcauggcc

SEQ ID NO: 3296 - RNA, 19 nt, Influenza A virus
ggcucuuggugaaaacaug

SEQ ID NO: 3297 - RNA, 19 nt, Influenza A virus
cuacacucucgacgaggaa

SEQ ID NO: 3298 - RNA, 19 nt, Influenza A virus
uuaccuugaaaaggccaau

SEQ ID NO: 3299 - RNA, 19 nt, Influenza A virus
gggcucuuggugaaaacau

SEQ ID NO: 3300 - RNA, 19 nt, Influenza A virus
gacuacacucucgacgagg

SEQ ID NO: 3301 - RNA, 19 nt, Influenza A virus
acuacacucucgacgagga

SEQ ID NO: 3302 - RNA, 19 nt, Influenza A virus
cucuuggugaaaacauggc

SEQ ID NO: 3303 - RNA, 19 nt, Influenza A virus
gcucuuggugaaaacaugg

SEQ ID NO: 3304 - RNA, 19 nt, Influenza A virus
ugguagaacuugaugaucc

SEQ ID NO: 3305 - RNA, 19 nt, Influenza A virus
augaagaaaacgagucaac

SEQ ID NO: 3306 - RNA, 19 nt, Influenza A virus
agacuacacucucgacgag

SEQ ID NO: 3307 - RNA, 19 nt, Influenza A virus
acaaggagaacagauucau

SEQ ID NO: 3308 - RNA, 19 nt, Influenza A virus
caaugcuucaacccgauga

SEQ ID NO: 3309 - RNA, 19 nt, Influenza A virus
gacaaugcuucaacccgau

SEQ ID NO: 3310 - RNA, 19 nt, Influenza A virus
acaaugcuucaacccgaug

SEQ ID NO: 3311 - RNA, 19 nt, Influenza A virus
uguucaauagccuguaugc

SEQ ID NO: 3312 - RNA, 19 nt, Influenza A virus
agucaaaccacacgaaaag

SEQ ID NO: 3313 - RNA, 19 nt, Influenza A virus
uacaaggagaacagauuca

SEQ ID NO: 3314 - RNA, 19 nt, Influenza A virus
guguucaauagccuguaug

SEQ ID NO: 3315 - RNA, 19 nt, Influenza A virus
aaugcuucaacccgaugau

SEQ ID NO: 3316 - RNA, 19 nt, Influenza A virus
gguagaacuugaugaucca

SEQ ID NO: 3317 - RNA, 19 nt, Influenza A virus
augcuucaacccgaugauu

SEQ ID NO: 3318 - RNA, 19 nt, Influenza A virus
ugaagaaaacgagucaacu

SEQ ID NO: 3319 - RNA, 19 nt, Influenza A virus
uaaagugggcucuugguga

SEQ ID NO: 3320 - RNA, 19 nt, Influenza A virus
auuacaaggagaacagauu

SEQ ID NO: 3321 - RNA, 19 nt, Influenza A virus
guucaauagccuguaugca

SEQ ID NO: 3322 - RNA, 19 nt, Influenza A virus
aauaaaucagaagcauggc

SEQ ID NO: 3323 - RNA, 19 nt, Influenza A virus
gauuacaaggagaacagau

SEQ ID NO: 3324 - RNA, 19 nt, Influenza A virus
uaaaucagaagcauggccc

SEQ ID NO: 3325 - RNA, 19 nt, Influenza A virus
auuuauauggauucaucau

SEQ ID NO: 3326 - RNA, 19 nt, Influenza A virus
uauauggauucaucauaaa

SEQ ID NO: 3327 - RNA, 19 nt, Influenza A virus
gcgacaaugcuucaacccg

SEQ ID NO: 3328 - RNA, 19 nt, Influenza A virus
aauuuauauggauucauca

SEQ ID NO: 3329 - RNA, 19 nt, Influenza A virus
uuuauauggauucaucaua

SEQ ID NO: 3330 - RNA, 19 nt, Influenza A virus
uuauauggauucaucauaa

SEQ ID NO: 3331 - RNA, 19 nt, Influenza A virus
cgacaaugcuucaacccga

SEQ ID NO: 3332 - RNA, 19 nt, Influenza A virus
uuacaaggagaacagauuc

SEQ ID NO: 3333 - RNA, 19 nt, Influenza A virus
augauuacaaggagaacag

SEQ ID NO: 3334 - RNA, 19 nt, Influenza A virus
uaugauuacaaggagaaca

SEQ ID NO: 3335 - RNA, 19 nt, Influenza A virus
agaauaaaucagaagcaug

SEQ ID NO: 3336 - RNA, 19 nt, Influenza A virus
cgagagcaugauugaagcc

SEQ ID NO: 3337 - RNA, 19 nt, Influenza A virus
gagaauaaaucagaagcau

SEQ ID NO: 3338 - RNA, 19 nt, Influenza A virus
gaauaaaucagaagcaugg

SEQ ID NO: 3339 - RNA, 19 nt, Influenza A virus
cuaaagugggcucuuggug

SEQ ID NO: 3340 - RNA, 19 nt, Influenza A virus
ugauuacaaggagaacaga

SEQ ID NO: 3341 - RNA, 19 nt, Influenza A virus
gcaacacuacuggagcuga

SEQ ID NO: 3342 - RNA, 19 nt, Influenza A virus
ugagaauaaaucagaagca

SEQ ID NO: 3343 - RNA, 19 nt, Influenza A virus
aaauugagcauugaagacc

SEQ ID NO: 3344 - RNA, 19 nt, Influenza A virus
aaaacauucuuuggaugga

SEQ ID NO: 3345 - RNA, 19 nt, Influenza A virus
caacuaaagugggcucuug

SEQ ID NO: 3346 - RNA, 19 nt, Influenza A virus
acuaaagugggcucuuggu

SEQ ID NO: 3347 - RNA, 19 nt, Influenza A virus
guaugauuacaaggagaac

SEQ ID NO: 3348 - RNA, 19 nt, Influenza A virus
aacuaaagugggcucuugg

SEQ ID NO: 3349 - RNA, 19 nt, Influenza A virus
aauugagcauugaagaccc

SEQ ID NO: 3350 - RNA, 19 nt, Influenza A virus
aaacauucuuuggauggaa

SEQ ID NO: 3351 - RNA, 19 nt, Influenza A virus
auugaguacauugcaagca

SEQ ID NO: 3352 - RNA, 19 nt, Influenza A virus
gugggcucuuggugaaaac

SEQ ID NO: 3353 - RNA, 19 nt, Influenza A virus
ucaacuaaagugggcucuu

SEQ ID NO: 3354 - RNA, 19 nt, Influenza A virus
aauugaguacauugcaagc

SEQ ID NO: 3355 - RNA, 19 nt, Influenza A virus
gucaacuaaagugggcucu

SEQ ID NO: 3356 - RNA, 19 nt, Influenza A virus
agucaacuaaagugggcuc

SEQ ID NO: 3357 - RNA, 19 nt, Influenza A virus
ccaauugaguacauugcaa

SEQ ID NO: 3358 - RNA, 19 nt, Influenza A virus
caauugaguacauugcaag

SEQ ID NO: 3359 - RNA, 19 nt, Influenza A virus
ugucauggaagcaaguauu

SEQ ID NO: 3360 - RNA, 19 nt, Influenza A virus
agugggcucuuggugaaaa

SEQ ID NO: 3361 - RNA, 19 nt, Influenza A virus
aagugggcucuuggugaaa

SEQ ID NO: 3362 - RNA, 19 nt, Influenza A virus
agaacuaaagagggaaggc

SEQ ID NO: 3363 - RNA, 19 nt, Influenza A virus
gaacuaaagagggaaggcg

SEQ ID NO: 3364 - RNA, 19 nt, Influenza A virus
cugucauggaagcaaguau

SEQ ID NO: 3365 - RNA, 19 nt, Influenza A virus
ucgaugaaauuggagagga

SEQ ID NO: 3366 - RNA, 19 nt, Influenza A virus
gccugcgagcuaacugauu

SEQ ID NO: 3367 - RNA, 19 nt, Influenza A virus
cucgaugaaauuggagagg

SEQ ID NO: 3368 - RNA, 19 nt, Influenza A virus
uugaguacauugcaagcau

SEQ ID NO: 3369 - RNA, 19 nt, Influenza A virus
ccugcgagcuaacugauuc

SEQ ID NO: 3370 - RNA, 19 nt, Influenza A virus
cugcgagcuaacugauuca

SEQ ID NO: 3371 - RNA, 19 nt, Influenza A virus
uugagcauugaagacccaa

SEQ ID NO: 3372 - RNA, 19 nt, Influenza A virus
aggagaacagauucaucga

SEQ ID NO: 3373 - RNA, 19 nt, Influenza A virus
caaggagaacagauucauc

SEQ ID NO: 3374 - RNA, 19 nt, Influenza A virus
cagauucaucgaaauugga

SEQ ID NO: 3375 - RNA, 19 nt, Influenza A virus
auuucaaggccuauguucu

SEQ ID NO: 3376 - RNA, 19 nt, Influenza A virus
uuucaaggccuauguucuu

SEQ ID NO: 3377 - RNA, 19 nt, Influenza A virus
aaggagaacagauucaucg

SEQ ID NO: 3378 - RNA, 19 nt, Influenza A virus
ccccaauugaguacauugc

SEQ ID NO: 3379 - RNA, 19 nt, Influenza A virus
ugaguacauugcaagcaug

SEQ ID NO: 3380 - RNA, 19 nt, Influenza A virus
ugagcauugaagacccaag

SEQ ID NO: 3381 - RNA, 19 nt, Influenza A virus
acuuugugagcauggaguu

SEQ ID NO: 3382 - RNA, 19 nt, Influenza A virus
gaguacauugcaagcauga

SEQ ID NO: 3383 - RNA, 19 nt, Influenza A virus
augacacagaugugguaaa

SEQ ID NO: 3384 - RNA, 19 nt, Influenza A virus
aaugacacagaugugguaa

SEQ ID NO: 3385 - RNA, 19 nt, Influenza A virus
uucaacaaggccugcgagc

SEQ ID NO: 3386 - RNA, 19 nt, Influenza A virus
guccaaagaagugaaugcc

SEQ ID NO: 3387 - RNA, 19 nt, Influenza A virus
uucaaggccuauguucuug

SEQ ID NO: 3388 - RNA, 19 nt, Influenza A virus
ucaacaaggccugcgagcu

SEQ ID NO: 3389 - RNA, 19 nt, Influenza A virus
aaacuuugugagcauggag

SEQ ID NO: 3390 - RNA, 19 nt, Influenza A virus
aacuuugugagcauggagu

SEQ ID NO: 3391 - RNA, 19 nt, Influenza A virus
gccccaauugaguacauug

SEQ ID NO: 3392 - RNA, 19 nt, Influenza A virus
aguacauugcaagcaugag

SEQ ID NO: 3393 - RNA, 19 nt, Influenza A virus
cccaauugaguacauugca

SEQ ID NO: 3394 - RNA, 19 nt, Influenza A virus
uuuguaugauuacaaggag

SEQ ID NO: 3395 - RNA, 19 nt, Influenza A virus
ggccugcgagcuaacugau

SEQ ID NO: 3396 - RNA, 19 nt, Influenza A virus
aaggccugcgagcuaacug

SEQ ID NO: 3397 - RNA, 19 nt, Influenza A virus
auugagcauugaagaccca

SEQ ID NO: 3398 - RNA, 19 nt, Influenza A virus
gaguucaacaaggccugcg

SEQ ID NO: 3399 - RNA, 19 nt, Influenza A virus
gagcauugaagacccaagu

SEQ ID NO: 3400 - RNA, 19 nt, Influenza A virus
uugacaacugcagagacau

SEQ ID NO: 3401 - RNA, 19 nt, Influenza A virus
guucaacaaggccugcgag

SEQ ID NO: 3402 - RNA, 19 nt, Influenza A virus
aguucaacaaggccugcga

SEQ ID NO: 3403 - RNA, 19 nt, Influenza A virus
uuugacaacugcagagaca

SEQ ID NO: 3404 - RNA, 19 nt, Influenza A virus
gcucgaugaaauuggagag

SEQ ID NO: 3405 - RNA, 19 nt, Influenza A virus
aggccugcgagcuaacuga

SEQ ID NO: 3406 - RNA, 19 nt, Influenza A virus
ugaguucaacaaggccugc

SEQ ID NO: 3407 - RNA, 19 nt, Influenza A virus
uccuuccugacacaugcau

SEQ ID NO: 3408 - RNA, 19 nt, Influenza A virus
augaguucaacaaggccug

SEQ ID NO: 3409 - RNA, 19 nt, Influenza A virus
aaugaguucaacaaggccu

SEQ ID NO: 3410 - RNA, 19 nt, Influenza A virus
ccuuccugacacaugcauu

SEQ ID NO: 3411 - RNA, 19 nt, Influenza A virus
aacaaggccugcgagcuaa

SEQ ID NO: 3412 - RNA, 19 nt, Influenza A virus
cuuccugacacaugcauua

SEQ ID NO: 3413 - RNA, 19 nt, Influenza A virus
caaggccugcgagcuaacu

SEQ ID NO: 3414 - RNA, 19 nt, Influenza A virus
ggagaacagauucaucgaa

SEQ ID NO: 3415 - RNA, 19 nt, Influenza A virus
caacaaggccugcgagcua

SEQ ID NO: 3416 - RNA, 19 nt, Influenza A virus
acaaggccugcgagcuaac

SEQ ID NO: 3417 - RNA, 19 nt, Influenza A virus
acaacugcagagacauaag

SEQ ID NO: 3418 - RNA, 19 nt, Influenza A virus
gagaacagauucaucgaaa

SEQ ID NO: 3419 - RNA, 19 nt, Influenza A virus
gaacagauucaucgaaauu

SEQ ID NO: 3420 - RNA, 19 nt, Influenza A virus
ugacaacugcagagacaua

SEQ ID NO: 3421 - RNA, 19 nt, Influenza A virus
cuaaagagggaaggcgaaa

SEQ ID NO: 3422 - RNA, 19 nt, Influenza A virus
gacaacugcagagacauaa

SEQ ID NO: 3423 - RNA, 19 nt, Influenza A virus
uuccugacacaugcauuaa

SEQ ID NO: 3424 - RNA, 19 nt, Influenza A virus
agaacagauucaucgaaau

SEQ ID NO: 3425 - RNA, 19 nt, Influenza A virus
acuaaagagggaaggcgaa

SEQ ID NO: 3426 - RNA, 19 nt, Influenza A virus
gaaugaguucaacaaggcc

SEQ ID NO: 3427 - RNA, 19 nt, Influenza A virus
gacuuugacaacugcagag

SEQ ID NO: 3428 - RNA, 19 nt, Influenza A virus
cuuugacaacugcagagac

SEQ ID NO: 3429 - RNA, 19 nt, Influenza A virus
aggaaugacacagaugugg

SEQ ID NO: 3430 - RNA, 19 nt, Influenza A virus
gaaugacacagauguggua

SEQ ID NO: 3431 - RNA, 19 nt, Influenza A virus
caacugcagagacauaagc

SEQ ID NO: 3432 - RNA, 19 nt, Influenza A virus
ggaaugacacagauguggu

SEQ ID NO: 3433 - RNA, 19 nt, Influenza A virus
gaagaaaacgagucaacua

SEQ ID NO: 3434 - RNA, 19 nt, Influenza A virus
aagaaaacgagucaacuaa

SEQ ID NO: 3435 - RNA, 19 nt, Influenza A virus
acuuugacaacugcagaga

SEQ ID NO: 3436 - RNA, 19 nt, Influenza A virus
aacgagucaacuaaagugg

SEQ ID NO: 3437 - RNA, 19 nt, Influenza A virus
uccugacacaugcauuaaa

SEQ ID NO: 3438 - RNA, 19 nt, Influenza A virus
cgaggaaagcagggcuagg

SEQ ID NO: 3439 - RNA, 19 nt, Influenza A virus
ggacaaacggaacaucaaa

SEQ ID NO: 3440 - RNA, 19 nt, Influenza A virus
aggacaaacggaacaucaa

SEQ ID NO: 3441 - RNA, 19 nt, Influenza A virus
acgagucaacuaaaguggg

SEQ ID NO: 3442 - RNA, 19 nt, Influenza A virus
acgaggaaagcagggcuag

SEQ ID NO: 3443 - RNA, 19 nt, Influenza A virus
acacaugcauuaaaauagu

SEQ ID NO: 3444 - RNA, 19 nt, Influenza A virus
ccugacacaugcauuaaaa

SEQ ID NO: 3445 - RNA, 19 nt, Influenza A virus
ugacacaugcauuaaaaua

SEQ ID NO: 3446 - RNA, 19 nt, Influenza A virus
gacaaacggaacaucaaag

SEQ ID NO: 3447 - RNA, 19 nt, Influenza A virus
uaguaaacaguaucugcaa

SEQ ID NO: 3448 - RNA, 19 nt, Influenza A virus
guaguaaacaguaucugca

SEQ ID NO: 3449 - RNA, 19 nt, Influenza A virus
aacuaaagagggaaggcga

SEQ ID NO: 3450 - RNA, 19 nt, Influenza A virus
agaaaacgagucaacuaaa

SEQ ID NO: 3451 - RNA, 19 nt, Influenza A virus
gacgaggaaagcagggcua

SEQ ID NO: 3452 - RNA, 19 nt, Influenza A virus
cacaugcauuaaaauaguu

SEQ ID NO: 3453 - RNA, 19 nt, Influenza A virus
aaaacgagucaacuaaagu

SEQ ID NO: 3454 - RNA, 19 nt, Influenza A virus
uaaggaaugacacagaugu

SEQ ID NO: 3455 - RNA, 19 nt, Influenza A virus
ccacugaguacauaaugaa

SEQ ID NO: 3456 - RNA, 19 nt, Influenza A virus
cgagucaacuaaagugggc

SEQ ID NO: 3457 - RNA, 19 nt, Influenza A virus
aaacgagucaacuaaagug

SEQ ID NO: 3458 - RNA, 19 nt, Influenza A virus
cugacacaugcauuaaaau

SEQ ID NO: 3459 - RNA, 19 nt, Influenza A virus
gccacugaguacauaauga

SEQ ID NO: 3460 - RNA, 19 nt, Influenza A virus
guacauugcaagcaugagg

SEQ ID NO: 3461 - RNA, 19 nt, Influenza A virus
cuuugugagcauggaguuu

SEQ ID NO: 3462 - RNA, 19 nt, Influenza A virus
ugaggacaaacggaacauc

SEQ ID NO: 3463 - RNA, 19 nt, Influenza A virus
gaggacaaacggaacauca

SEQ ID NO: 3464 - RNA, 19 nt, Influenza A virus
aaggaaugacacagaugug

SEQ ID NO: 3465 - RNA, 19 nt, Influenza A virus
uuaaggaaugacacagaug

SEQ ID NO: 3466 - RNA, 19 nt, Influenza A virus
aguaaacaguaucugcaac

SEQ ID NO: 3467 - RNA, 19 nt, Influenza A virus
caugaagaaaacgagucaa

SEQ ID NO: 3468 - RNA, 19 nt, Influenza A virus
cacugaguacauaaugaag

SEQ ID NO: 3469 - RNA, 19 nt, Influenza A virus
caguaguaaacaguaucug

SEQ ID NO: 3470 - RNA, 19 nt, Influenza A virus
gacaguaguaaacaguauc

SEQ ID NO: 3471 - RNA, 19 nt, Influenza A virus
aguaguaaacaguaucugc

SEQ ID NO: 3472 - RNA, 19 nt, Influenza A virus
caauggacgauuuucaacu

SEQ ID NO: 3473 - RNA, 19 nt, Influenza A virus
acaguaguaaacaguaucu

SEQ ID NO: 3474 - RNA, 19 nt, Influenza A virus
gcaauggacgauuuucaac

SEQ ID NO: 3475 - RNA, 19 nt, Influenza A virus
gacacaugcauuaaaauag

SEQ ID NO: 3476 - RNA, 19 nt, Influenza A virus
gucauggaagcaaguauug

SEQ ID NO: 3477 - RNA, 19 nt, Influenza A virus
aaagugggcucuuggugaa

SEQ ID NO: 3478 - RNA, 19 nt, Influenza A virus
uaugugaggacaaacggaa

SEQ ID NO: 3479 - RNA, 19 nt, Influenza A virus
gugaggacaaacggaacau

SEQ ID NO: 3480 - RNA, 19 nt, Influenza A virus
uccuccugauggaugcuuu

SEQ ID NO: 3481 - RNA, 19 nt, Influenza A virus
cgacgaggaaagcagggcu

SEQ ID NO: 3482 - RNA, 19 nt, Influenza A virus
uuccuccugauggaugcuu

SEQ ID NO: 3483 - RNA, 19 nt, Influenza A virus
ugugaggacaaacggaaca

SEQ ID NO: 3484 - RNA, 19 nt, Influenza A virus
augugaggacaaacggaac

SEQ ID NO: 3485 - RNA, 19 nt, Influenza A virus
uuguaugugaggacaaacg

SEQ ID NO: 3486 - RNA, 19 nt, Influenza A virus
uguaugugaggacaaacgg

SEQ ID NO: 3487 - RNA, 19 nt, Influenza A virus
guaugugaggacaaacgga

SEQ ID NO: 3488 - RNA, 19 nt, Influenza A virus
aguaucugcaacacuacug

SEQ ID NO: 3489 - RNA, 19 nt, Influenza A virus
gagccacugaguacauaau

SEQ ID NO: 3490 - RNA, 19 nt, Influenza A virus
agccacugaguacauaaug

SEQ ID NO: 3491 - RNA, 19 nt, Influenza A virus
agagccacugaguacauaa

SEQ ID NO: 3492 - RNA, 19 nt, Influenza A virus
caguaucugcaacacuacu

SEQ ID NO: 3493 - RNA, 19 nt, Influenza A virus
guaucugcaacacuacugg

SEQ ID NO: 3494 - RNA, 19 nt, Influenza A virus
gaaaacgagucaacuaaag

SEQ ID NO: 3495 - RNA, 19 nt, Influenza A virus
uucaucgaaauuggaguga

SEQ ID NO: 3496 - RNA, 19 nt, Influenza A virus
agacuuugacaacugcaga

SEQ ID NO: 3497 - RNA, 19 nt, Influenza A virus
aguagacuuugacaacugc

SEQ ID NO: 3498 - RNA, 19 nt, Influenza A virus
ggaagcaaguauugucaga

SEQ ID NO: 3499 - RNA, 19 nt, Influenza A virus
uagacuuugacaacugcag

SEQ ID NO: 3500 - RNA, 19 nt, Influenza A virus
guagacuuugacaacugca

SEQ ID NO: 3501 - RNA, 19 nt, Influenza A virus
uggaagcaaguauugucag

SEQ ID NO: 3502 - RNA, 19 nt, Influenza A virus
cuuguaugugaggacaaac

SEQ ID NO: 3503 - RNA, 19 nt, Influenza A virus
caucgaaauuggagugaca

SEQ ID NO: 3504 - RNA, 19 nt, Influenza A virus
ucauggaagcaaguauugu

SEQ ID NO: 3505 - RNA, 19 nt, Influenza A virus
auucaucgaaauuggagug

SEQ ID NO: 3506 - RNA, 19 nt, Influenza A virus
ucaucgaaauuggagugac

SEQ ID NO: 3507 - RNA, 19 nt, Influenza A virus
caagucacgaaggagaagg

SEQ ID NO: 3508 - RNA, 19 nt, Influenza A virus
ucaucauaaaaggaagauc

SEQ ID NO: 3509 - RNA, 19 nt, Influenza A virus
uggacgauuuucaacuaau

SEQ ID NO: 3510 - RNA, 19 nt, Influenza A virus
uccaaauuccuccugaugg

SEQ ID NO: 3511 - RNA, 19 nt, Influenza A virus
agucacgaaggagaaggga

SEQ ID NO: 3512 - RNA, 19 nt, Influenza A virus
caaauuccuccugauggau

SEQ ID NO: 3513 - RNA, 19 nt, Influenza A virus
ccaaauuccuccugaugga

SEQ ID NO: 3514 - RNA, 19 nt, Influenza A virus
aauggacgauuuucaacua

SEQ ID NO: 3515 - RNA, 19 nt, Influenza A virus
ccaagucacgaaggagaag

SEQ ID NO: 3516 - RNA, 19 nt, Influenza A virus
auggacgauuuucaacuaa

SEQ ID NO: 3517 - RNA, 19 nt, Influenza A virus
aauuccuccugauggaugc

SEQ ID NO: 3518 - RNA, 19 nt, Influenza A virus
uucaucauaaaaggaagau

SEQ ID NO: 3519 - RNA, 19 nt, Influenza A virus
gucacgaaggagaagggau

SEQ ID NO: 3520 - RNA, 19 nt, Influenza A virus
aaauuccuccugauggaug

SEQ ID NO: 3521 - RNA, 19 nt, Influenza A virus
cauggaagcaaguauuguc

SEQ ID NO: 3522 - RNA, 19 nt, Influenza A virus
auggaagcaaguauuguca

SEQ ID NO: 3523 - RNA, 19 nt, Influenza A virus
ggaaagcagggcuaggauu

SEQ ID NO: 3524 - RNA, 19 nt, Influenza A virus
aaaucucaggaacuaugcg

SEQ ID NO: 3525 - RNA, 19 nt, Influenza A virus
cccaagucacgaaggagaa

SEQ ID NO: 3526 - RNA, 19 nt, Influenza A virus
gauugaagccgaguccucg

SEQ ID NO: 3527 - RNA, 19 nt, Influenza A virus
cgaugaaauuggagaggac

SEQ ID NO: 3528 - RNA, 19 nt, Influenza A virus
auuccuccugauggaugcu

SEQ ID NO: 3529 - RNA, 19 nt, Influenza A virus
guccaaauuccuccugaug

SEQ ID NO: 3530 - RNA, 19 nt, Influenza A virus
gguccaaauuccuccugau

SEQ ID NO: 3531 - RNA, 19 nt, Influenza A virus
ugagcauggaguuuucucu

SEQ ID NO: 3532 - RNA, 19 nt, Influenza A virus
ucauaaaaggaagaucuca

SEQ ID NO: 3533 - RNA, 19 nt, Influenza A virus
aagaagugccauaggccaa

SEQ ID NO: 3534 - RNA, 19 nt, Influenza A virus
cgguccaaauuccuccuga

SEQ ID NO: 3535 - RNA, 19 nt, Influenza A virus
aucauaaaaggaagaucuc

SEQ ID NO: 3536 - RNA, 19 nt, Influenza A virus
ugugagcauggaguuuucu

SEQ ID NO: 3537 - RNA, 19 nt, Influenza A virus
gcaucacuccaaauggaag

SEQ ID NO: 3538 - RNA, 19 nt, Influenza A virus
ugcaucacuccaaauggaa

SEQ ID NO: 3539 - RNA, 19 nt, Influenza A virus
augcaucacuccaaaugga

SEQ ID NO: 3540 - RNA, 19 nt, Influenza A virus
aaugcaucacuccaaaugg

SEQ ID NO: 3541 - RNA, 19 nt, Influenza A virus
gaaugcaucacuccaaaug

SEQ ID NO: 3542 - RNA, 19 nt, Influenza A virus
ucacuccaaauggaagcau

SEQ ID NO: 3543 - RNA, 19 nt, Influenza A virus
uguuacccuuaugaugugc

SEQ ID NO: 3544 - RNA, 19 nt, Influenza A virus
caucacuccaaauggaagc

SEQ ID NO: 3545 - RNA, 19 nt, Influenza A virus
aucacuccaaauggaagca

SEQ ID NO: 3546 - RNA, 19 nt, Influenza A virus
ucuuauuucuucggagaca

SEQ ID NO: 3547 - RNA, 19 nt, Influenza A virus
auuucuucggagacaaugc

SEQ ID NO: 3548 - RNA, 19 nt, Influenza A virus
uauuucuucggagacaaug

SEQ ID NO: 3549 - RNA, 19 nt, Influenza A virus
uuauuucuucggagacaau

SEQ ID NO: 3550 - RNA, 19 nt, Influenza A virus
cuuauuucuucggagacaa

SEQ ID NO: 3551 - RNA, 19 nt, Influenza A virus
uuucuucggagacaaugca

SEQ ID NO: 3552 - RNA, 19 nt, Influenza A virus
augaaggaucuuauuucuu

SEQ ID NO: 3553 - RNA, 19 nt, Influenza A virus
aaugaaggaucuuauuucu

SEQ ID NO: 3554 - RNA, 19 nt, Influenza A virus
gaaggaucuuauuucuucg

SEQ ID NO: 3555 - RNA, 19 nt, Influenza A virus
aaggaucuuauuucuucgg

SEQ ID NO: 3556 - RNA, 19 nt, Influenza A virus
ugaaggaucuuauuucuuc

SEQ ID NO: 3557 - RNA, 19 nt, Influenza A virus
uaaugaaggaucuuauuuc

SEQ ID NO: 3558 - RNA, 19 nt, Influenza A virus
uucuucggagacaaugcag

SEQ ID NO: 3559 - RNA, 19 nt, Influenza A virus
ucuucggagacaaugcaga

SEQ ID NO: 3560 - RNA, 19 nt, Influenza A virus
gaucuuauuucuucggaga

SEQ ID NO: 3561 - RNA, 19 nt, Influenza A virus
ggaucuuauuucuucggag

SEQ ID NO: 3562 - RNA, 19 nt, Influenza A virus
aucuuauuucuucggagac

SEQ ID NO: 3563 - RNA, 19 nt, Influenza A virus
aggaucuuauuucuucgga

SEQ ID NO: 3564 - RNA, 19 nt, Influenza A virus
aguaaugaaggaucuuauu

SEQ ID NO: 3565 - RNA, 19 nt, Influenza A virus
guaaugaaggaucuuauuu

SEQ ID NO: 3566 - RNA, 19 nt, Influenza A virus
augaguaaugaaggaucuu

SEQ ID NO: 3567 - RNA, 19 nt, Influenza A virus
ugaguaaugaaggaucuua

SEQ ID NO: 3568 - RNA, 19 nt, Influenza A virus
gaguaaugaaggaucuuau

SEQ ID NO: 3569 - RNA, 19 nt, Influenza A virus
uacaaauugcuucaaauga

SEQ ID NO: 3570 - RNA, 19 nt, Influenza A virus
aauuucaaacagcugcaca

SEQ ID NO: 3571 - RNA, 19 nt, Influenza A virus
aaauuucaaacagcugcac

SEQ ID NO: 3572 - RNA, 19 nt, Influenza A virus
guacaaauugcuucaaaug

SEQ ID NO: 3573 - RNA, 19 nt, Influenza A virus
auggugcucucugcuuuug

SEQ ID NO: 3574 - RNA, 19 nt, Influenza A virus
uggugcucucugcuuuuga

SEQ ID NO: 3575 - RNA, 19 nt, Influenza A virus
caaggcaccaaacggucuu

SEQ ID NO: 3576 - RNA, 19 nt, Influenza A virus
aaggcaccaaacggucuua

SEQ ID NO: 3577 - RNA, 19 nt, Influenza A virus
agagaaugugcaacauucu

SEQ ID NO: 3578 - RNA, 19 nt, Influenza A virus
gagagaaugugcaacauuc

SEQ ID NO: 3579 - RNA, 19 nt, Influenza A virus
auuucaaacagcugcacaa

SEQ ID NO: 3580 - RNA, 19 nt, Influenza A virus
uuucaaacagcugcacaaa

SEQ ID NO: 3581 - RNA, 19 nt, Influenza A virus
ggaacccaggaaaugcuga

SEQ ID NO: 3582 - RNA, 19 nt, Influenza A virus
cgaacccgaucgugcccuc

SEQ ID NO: 3583 - RNA, 19 nt, Influenza A virus
cggaacccaggaaaugcug

SEQ ID NO: 3584 - RNA, 19 nt, Influenza A virus
aaugcugagaucgaagauc

SEQ ID NO: 3585 - RNA, 19 nt, Influenza A virus
augcugagaucgaagaucu

SEQ ID NO: 3586 - RNA, 19 nt, Influenza A virus
gauucuacauccaaaugug

SEQ ID NO: 3587 - RNA, 19 nt, Influenza A virus
gcugagaucgaagaucuca

SEQ ID NO: 3588 - RNA, 19 nt, Influenza A virus
ucauggcagcauucacugg

SEQ ID NO: 3589 - RNA, 19 nt, Influenza A virus
aauggugcucucugcuuuu

SEQ ID NO: 3590 - RNA, 19 nt, Influenza A virus
acccaggaaaugcugagau

SEQ ID NO: 3591 - RNA, 19 nt, Influenza A virus
ucagacaugagggcagaaa

SEQ ID NO: 3592 - RNA, 19 nt, Influenza A virus
ugcugagaucgaagaucuc

SEQ ID NO: 3593 - RNA, 19 nt, Influenza A virus
cagacaugagggcagaaau

SEQ ID NO: 3594 - RNA, 19 nt, Influenza A virus
aacccaggaaaugcugaga

SEQ ID NO: 3595 - RNA, 19 nt, Influenza A virus
aaaugcugagaucgaagau

SEQ ID NO: 3596 - RNA, 19 nt, Influenza A virus
gaaaugcugagaucgaaga

SEQ ID NO: 3597 - RNA, 19 nt, Influenza A virus
gaacccaggaaaugcugag

SEQ ID NO: 3598 - RNA, 19 nt, Influenza A virus
ccaggaaaugcugagaucg

SEQ ID NO: 3599 - RNA, 19 nt, Influenza A virus
aggaaaugcugagaucgaa

SEQ ID NO: 3600 - RNA, 19 nt, Influenza A virus
caggaaaugcugagaucga

SEQ ID NO: 3601 - RNA, 19 nt, Influenza A virus
ggaaaugcugagaucgaag

SEQ ID NO: 3602 - RNA, 19 nt, Influenza A virus
uggaucaagugagagaaag

SEQ ID NO: 3603 - RNA, 19 nt, Influenza A virus
uaugagagaaugugcaaca

SEQ ID NO: 3604 - RNA, 19 nt, Influenza A virus
augagagaaugugcaacau

SEQ ID NO: 3605 - RNA, 19 nt, Influenza A virus
gaaaauuucaaacagcugc

SEQ ID NO: 3606 - RNA, 19 nt, Influenza A virus
ggaaaauuucaaacagcug

SEQ ID NO: 3607 - RNA, 19 nt, Influenza A virus
aaaggaaaauuucaaacag

SEQ ID NO: 3608 - RNA, 19 nt, Influenza A virus
aggaaaauuucaaacagcu

SEQ ID NO: 3609 - RNA, 19 nt, Influenza A virus
aaggaaaauuucaaacagc

SEQ ID NO: 3610 - RNA, 19 nt, Influenza A virus
cccaggaaaugcugagauc

SEQ ID NO: 3611 - RNA, 19 nt, Influenza A virus
aaaauuucaaacagcugca

SEQ ID NO: 3612 - RNA, 19 nt, Influenza A virus
cuuaugaacagauggaaac

SEQ ID NO: 3613 - RNA, 19 nt, Influenza A virus
ucuuaugaacagauggaaa

SEQ ID NO: 3614 - RNA, 19 nt, Influenza A virus
uaugaacagauggaaacug

SEQ ID NO: 3615 - RNA, 19 nt, Influenza A virus
agggaacucguccuuuaug

SEQ ID NO: 3616 - RNA, 19 nt, Influenza A virus
gggaacucguccuuuauga

SEQ ID NO: 3617 - RNA, 19 nt, Influenza A virus
uuaugaacagauggaaacu

SEQ ID NO: 3618 - RNA, 19 nt, Influenza A virus
auucugcugcauuugaaga

SEQ ID NO: 3619 - RNA, 19 nt, Influenza A virus
ugagggaacucguccuuua

SEQ ID NO: 3620 - RNA, 19 nt, Influenza A virus
gagggaacucguccuuuau

SEQ ID NO: 3621 - RNA, 19 nt, Influenza A virus
uucugcugcauuugaagau

SEQ ID NO: 3622 - RNA, 19 nt, Influenza A virus
gaggaaacacuaaucaaca

SEQ ID NO: 3623 - RNA, 19 nt, Influenza A virus
ggaggaaacacuaaucaac

SEQ ID NO: 3624 - RNA, 19 nt, Influenza A virus
aguggaggaaacacuaauc

SEQ ID NO: 3625 - RNA, 19 nt, Influenza A virus
guggaggaaacacuaauca

SEQ ID NO: 3626 - RNA, 19 nt, Influenza A virus
uggaggaaacacuaaucaa

SEQ ID NO: 3627 - RNA, 19 nt, Influenza A virus
gagggucaguugcucacaa

SEQ ID NO: 3628 - RNA, 19 nt, Influenza A virus
agagggucaguugcucaca

SEQ ID NO: 3629 - RNA, 19 nt, Influenza A virus
cagcugguguggauggcau

SEQ ID NO: 3630 - RNA, 19 nt, Influenza A virus
agcugguguggauggcaug

SEQ ID NO: 3631 - RNA, 19 nt, Influenza A virus
gcugguguggauggcaugc

SEQ ID NO: 3632 - RNA, 19 nt, Influenza A virus
acuucgaaaaagagggaua

SEQ ID NO: 3633 - RNA, 19 nt, Influenza A virus
caacgaacccgaucgugcc

SEQ ID NO: 3634 - RNA, 19 nt, Influenza A virus
gcaacgaacccgaucgugc

SEQ ID NO: 3635 - RNA, 19 nt, Influenza A virus
augagggcagaaaucauaa

SEQ ID NO: 3636 - RNA, 19 nt, Influenza A virus
ucagcugguguggauggca

SEQ ID NO: 3637 - RNA, 19 nt, Influenza A virus
gucagcugguguggauggc

SEQ ID NO: 3638 - RNA, 19 nt, Influenza A virus
ggcaacgaacccgaucgug

SEQ ID NO: 3639 - RNA, 19 nt, Influenza A virus
agucagcugguguggaugg

SEQ ID NO: 3640 - RNA, 19 nt, Influenza A virus
uucaaacagcugcacaaag

SEQ ID NO: 3641 - RNA, 19 nt, Influenza A virus
uucuacauccaaaugugca

SEQ ID NO: 3642 - RNA, 19 nt, Influenza A virus
ucuacauccaaaugugcac

SEQ ID NO: 3643 - RNA, 19 nt, Influenza A virus
caugagggcagaaaucaua

SEQ ID NO: 3644 - RNA, 19 nt, Influenza A virus
acaugagggcagaaaucau

SEQ ID NO: 3645 - RNA, 19 nt, Influenza A virus
gacaugagggcagaaauca

SEQ ID NO: 3646 - RNA, 19 nt, Influenza A virus
gaguacaaauugcuucaaa

SEQ ID NO: 3647 - RNA, 19 nt, Influenza A virus
gcacacaagagucagcugg

SEQ ID NO: 3648 - RNA, 19 nt, Influenza A virus
gagaauccagcacacaaga

SEQ ID NO: 3649 - RNA, 19 nt, Influenza A virus
cacacaagagucagcuggu

SEQ ID NO: 3650 - RNA, 19 nt, Influenza A virus
ggaguacaaauugcuucaa

SEQ ID NO: 3651 - RNA, 19 nt, Influenza A virus
agaauccagcacacaagag

SEQ ID NO: 3652 - RNA, 19 nt, Influenza A virus
cagcacacaagagucagcu

SEQ ID NO: 3653 - RNA, 19 nt, Influenza A virus
aguacaaauugcuucaaau

SEQ ID NO: 3654 - RNA, 19 nt, Influenza A virus
ccagcacacaagagucagc

SEQ ID NO: 3655 - RNA, 19 nt, Influenza A virus
auucuacauccaaaugugc

SEQ ID NO: 3656 - RNA, 19 nt, Influenza A virus
acaagagucagcuggugug

SEQ ID NO: 3657 - RNA, 19 nt, Influenza A virus
agcacacaagagucagcug

SEQ ID NO: 3658 - RNA, 19 nt, Influenza A virus
ugcuuaugagagaaugugc

SEQ ID NO: 3659 - RNA, 19 nt, Influenza A virus
caagagucagcuggugugg

SEQ ID NO: 3660 - RNA, 19 nt, Influenza A virus
agagucagcugguguggau

SEQ ID NO: 3661 - RNA, 19 nt, Influenza A virus
gagucagcugguguggaug

SEQ ID NO: 3662 - RNA, 19 nt, Influenza A virus
cacaagagucagcuggugu

SEQ ID NO: 3663 - RNA, 19 nt, Influenza A virus
gcuuaugagagaaugugca

SEQ ID NO: 3664 - RNA, 19 nt, Influenza A virus
cuuaugagagaaugugcaa

SEQ ID NO: 3665 - RNA, 19 nt, Influenza A virus
aagagucagcuggugugga

SEQ ID NO: 3666 - RNA, 19 nt, Influenza A virus
ccaaacggucuuaugaaca

SEQ ID NO: 3667 - RNA, 19 nt, Influenza A virus
ggcaccaaacggucuuaug

SEQ ID NO: 3668 - RNA, 19 nt, Influenza A virus
gcaccaaacggucuuauga

SEQ ID NO: 3669 - RNA, 19 nt, Influenza A virus
accaaacggucuuaugaac

SEQ ID NO: 3670 - RNA, 19 nt, Influenza A virus
aggcaccaaacggucuuau

SEQ ID NO: 3671 - RNA, 19 nt, Influenza A virus
ugagagaaugugcaacauu

SEQ ID NO: 3672 - RNA, 19 nt, Influenza A virus
aauccagcacacaagaguc

SEQ ID NO: 3673 - RNA, 19 nt, Influenza A virus
acacaagagucagcuggug

SEQ ID NO: 3674 - RNA, 19 nt, Influenza A virus
auccagcacacaagaguca

SEQ ID NO: 3675 - RNA, 19 nt, Influenza A virus
caccaaacggucuuaugaa

SEQ ID NO: 3676 - RNA, 19 nt, Influenza A virus
agacaugagggcagaaauc

SEQ ID NO: 3677 - RNA, 19 nt, Influenza A virus
gacuucgaaaaagagggau

SEQ ID NO: 3678 - RNA, 19 nt, Influenza A virus
gaauccagcacacaagagu

SEQ ID NO: 3679 - RNA, 19 nt, Influenza A virus
cagaggacaagagcucuug

SEQ ID NO: 3680 - RNA, 19 nt, Influenza A virus
cggucuuaugaacagaugg

SEQ ID NO: 3681 - RNA, 19 nt, Influenza A virus
agaggacaagagcucuugu

SEQ ID NO: 3682 - RNA, 19 nt, Influenza A virus
acggucuuaugaacagaug

SEQ ID NO: 3683 - RNA, 19 nt, Influenza A virus
uacgacuucgaaaaagagg

SEQ ID NO: 3684 - RNA, 19 nt, Influenza A virus
ggucuuaugaacagaugga

SEQ ID NO: 3685 - RNA, 19 nt, Influenza A virus
acgacuucgaaaaagaggg

SEQ ID NO: 3686 - RNA, 19 nt, Influenza A virus
aacggucuuaugaacagau

SEQ ID NO: 3687 - RNA, 19 nt, Influenza A virus
aaacggucuuaugaacaga

SEQ ID NO: 3688 - RNA, 19 nt, Influenza A virus
caaacggucuuaugaacag

SEQ ID NO: 3689 - RNA, 19 nt, Influenza A virus
uuaugagagaaugugcaac

SEQ ID NO: 3690 - RNA, 19 nt, Influenza A virus
cgacuucgaaaaagaggga

SEQ ID NO: 3691 - RNA, 19 nt, Influenza A virus
uccagcacacaagagucag

SEQ ID NO: 3692 - RNA, 19 nt, Influenza A virus
augaacagauggaaacuga

SEQ ID NO: 3693 - RNA, 19 nt, Influenza A virus
ugaacagauggaaacugau

SEQ ID NO: 3694 - RNA, 19 nt, Influenza A virus
aacagauggaaacugaugg

SEQ ID NO: 3695 - RNA, 19 nt, Influenza A virus
gucuuaugaacagauggaa

SEQ ID NO: 3696 - RNA, 19 nt, Influenza A virus
cugagaucgaagaucucau

SEQ ID NO: 3697 - RNA, 19 nt, Influenza A virus
gaacagauggaaacugaug

SEQ ID NO: 3698 - RNA, 19 nt, Influenza A virus
ggaaacacuaaucaacaga

SEQ ID NO: 3699 - RNA, 19 nt, Influenza A virus
acgagaauccagcacacaa

SEQ ID NO: 3700 - RNA, 19 nt, Influenza A virus
aacgagaauccagcacaca

SEQ ID NO: 3701 - RNA, 19 nt, Influenza A virus
acacuaaucaacagagggc

SEQ ID NO: 3702 - RNA, 19 nt, Influenza A virus
cgagaauccagcacacaag

SEQ ID NO: 3703 - RNA, 19 nt, Influenza A virus
aacacuaaucaacagaggg

SEQ ID NO: 3704 - RNA, 19 nt, Influenza A virus
aggaaacacuaaucaacag

SEQ ID NO: 3705 - RNA, 19 nt, Influenza A virus
gaaacacuaaucaacagag

SEQ ID NO: 3706 - RNA, 19 nt, Influenza A virus
aggaguacaaauugcuuca

SEQ ID NO: 3707 - RNA, 19 nt, Influenza A virus
gaggaguacaaauugcuuc

SEQ ID NO: 3708 - RNA, 19 nt, Influenza A virus
agaggaguacaaauugcuu

SEQ ID NO: 3709 - RNA, 19 nt, Influenza A virus
aaacacuaaucaacagagg

SEQ ID NO: 3710 - RNA, 19 nt, Influenza A virus
uauugagagggucaguugc

SEQ ID NO: 3711 - RNA, 19 nt, Influenza A virus
aacccgaucgugcccucuu

SEQ ID NO: 3712 - RNA, 19 nt, Influenza A virus
cccgaucgugcccucuuuu

SEQ ID NO: 3713 - RNA, 19 nt, Influenza A virus
gaacccgaucgugcccucu

SEQ ID NO: 3714 - RNA, 19 nt, Influenza A virus
acccgaucgugcccucuuu

SEQ ID NO: 3715 - RNA, 19 nt, Influenza A virus
cgaucgugcccucuuuuga

SEQ ID NO: 3716 - RNA, 19 nt, Influenza A virus
ccgaucgugcccucuuuug

SEQ ID NO: 3717 - RNA, 19 nt, Influenza A virus
cuagaggaguacaaauugc

SEQ ID NO: 3718 - RNA, 19 nt, Influenza A virus
acuagaggaguacaaauug

SEQ ID NO: 3719 - RNA, 19 nt, Influenza A virus
uagaggaguacaaauugcu

SEQ ID NO: 3720 - RNA, 19 nt, Influenza A virus
agauggaaacugaugggga

SEQ ID NO: 3721 - RNA, 19 nt, Influenza A virus
cagauggaaacugaugggg

SEQ ID NO: 3722 - RNA, 19 nt, Influenza A virus
aguggguacgacuucgaaa

SEQ ID NO: 3723 - RNA, 19 nt, Influenza A virus
acagauggaaacugauggg

SEQ ID NO: 3724 - RNA, 19 nt, Influenza A virus
cuaaucaacagagggccuc

SEQ ID NO: 3725 - RNA, 19 nt, Influenza A virus
acuaaucaacagagggccu

SEQ ID NO: 3726 - RNA, 19 nt, Influenza A virus
caguggguacgacuucgaa

SEQ ID NO: 3727 - RNA, 19 nt, Influenza A virus
ccaguggguacgacuucga

SEQ ID NO: 3728 - RNA, 19 nt, Influenza A virus
ugauggaaggugcaaaacc

SEQ ID NO: 3729 - RNA, 19 nt, Influenza A virus
aagaagaaauaaggcgaau

SEQ ID NO: 3730 - RNA, 19 nt, Influenza A virus
guggguacgacuucgaaaa

SEQ ID NO: 3731 - RNA, 19 nt, Influenza A virus
aaagaagaaauaaggcgaa

SEQ ID NO: 3732 - RNA, 19 nt, Influenza A virus
gauggaaggugcaaaacca

SEQ ID NO: 3733 - RNA, 19 nt, Influenza A virus
ugugcucucugaugcaggg

SEQ ID NO: 3734 - RNA, 19 nt, Influenza A virus
auauugagagggucaguug

SEQ ID NO: 3735 - RNA, 19 nt, Influenza A virus
augugcucucugaugcagg

SEQ ID NO: 3736 - RNA, 19 nt, Influenza A virus
auggaaggugcaaaaccag

SEQ ID NO: 3737 - RNA, 19 nt, Influenza A virus
uggaaggugcaaaaccaga

SEQ ID NO: 3738 - RNA, 19 nt, Influenza A virus
cacuaaucaacagagggcc

SEQ ID NO: 3739 - RNA, 19 nt, Influenza A virus
augauggaaggugcaaaac

SEQ ID NO: 3740 - RNA, 19 nt, Influenza A virus
accagaggacaagagcucu

SEQ ID NO: 3741 - RNA, 19 nt, Influenza A virus
uaccagaggacaagagcuc

SEQ ID NO: 3742 - RNA, 19 nt, Influenza A virus
agaugauugauggaauugg

SEQ ID NO: 3743 - RNA, 19 nt, Influenza A virus
ccagaggacaagagcucuu

SEQ ID NO: 3744 - RNA, 19 nt, Influenza A virus
aagaugauugauggaauug

SEQ ID NO: 3745 - RNA, 19 nt, Influenza A virus
gaaauaaggcgaaucuggc

SEQ ID NO: 3746 - RNA, 19 nt, Influenza A virus
aaauaaggcgaaucuggcg

SEQ ID NO: 3747 - RNA, 19 nt, Influenza A virus
gagagggucaguugcucac

SEQ ID NO: 3748 - RNA, 19 nt, Influenza A virus
ugagagggucaguugcuca

SEQ ID NO: 3749 - RNA, 19 nt, Influenza A virus
cugaacuuaaacucaguga

SEQ ID NO: 3750 - RNA, 19 nt, Influenza A virus
ugaacuuaaacucagugau

SEQ ID NO: 3751 - RNA, 19 nt, Influenza A virus
uugagagggucaguugcuc

SEQ ID NO: 3752 - RNA, 19 nt, Influenza A virus
acugaacuuaaacucagug

SEQ ID NO: 3753 - RNA, 19 nt, Influenza A virus
caaacagcugcacaaagag

SEQ ID NO: 3754 - RNA, 19 nt, Influenza A virus
auugagagggucaguugcu

SEQ ID NO: 3755 - RNA, 19 nt, Influenza A virus
aaacagcugcacaaagagc

SEQ ID NO: 3756 - RNA, 19 nt, Influenza A virus
ucaguugcucacaaaucuu

SEQ ID NO: 3757 - RNA, 19 nt, Influenza A virus
uggguacgacuucgaaaaa

SEQ ID NO: 3758 - RNA, 19 nt, Influenza A virus
caguugcucacaaaucuug

SEQ ID NO: 3759 - RNA, 19 nt, Influenza A virus
ggguacgacuucgaaaaag

SEQ ID NO: 3760 - RNA, 19 nt, Influenza A virus
gguacgacuucgaaaaaga

SEQ ID NO: 3761 - RNA, 19 nt, Influenza A virus
ucaaacagcugcacaaaga

SEQ ID NO: 3762 - RNA, 19 nt, Influenza A virus
guacgacuucgaaaaagag

SEQ ID NO: 3763 - RNA, 19 nt, Influenza A virus
gaugagggaacucguccuu

SEQ ID NO: 3764 - RNA, 19 nt, Influenza A virus
uggaugagggaacucgucc

SEQ ID NO: 3765 - RNA, 19 nt, Influenza A virus
ggaugagggaacucguccu

SEQ ID NO: 3766 - RNA, 19 nt, Influenza A virus
cagcugcacaaagagcaau

SEQ ID NO: 3767 - RNA, 19 nt, Influenza A virus
augagggaacucguccuuu

SEQ ID NO: 3768 - RNA, 19 nt, Influenza A virus
agcugcacaaagagcaaug

SEQ ID NO: 3769 - RNA, 19 nt, Influenza A virus
acagcugcacaaagagcaa

SEQ ID NO: 3770 - RNA, 19 nt, Influenza A virus
aacagcugcacaaagagca

SEQ ID NO: 3771 - RNA, 19 nt, Influenza A virus
uaagcuucaucagagggac

SEQ ID NO: 3772 - RNA, 19 nt, Influenza A virus
agaaauaaggcgaaucugg

SEQ ID NO: 3773 - RNA, 19 nt, Influenza A virus
gaagaaauaaggcgaaucu

SEQ ID NO: 3774 - RNA, 19 nt, Influenza A virus
aagaaauaaggcgaaucug

SEQ ID NO: 3775 - RNA, 19 nt, Influenza A virus
uuaagcuucaucagaggga

SEQ ID NO: 3776 - RNA, 19 nt, Influenza A virus
gggaagaugauugauggaa

SEQ ID NO: 3777 - RNA, 19 nt, Influenza A virus
acgaacccgaucgugcccu

SEQ ID NO: 3778 - RNA, 19 nt, Influenza A virus
ggaagaugauugauggaau

SEQ ID NO: 3779 - RNA, 19 nt, Influenza A virus
aacgaacccgaucgugccc

SEQ ID NO: 3780 - RNA, 19 nt, Influenza A virus
gccagaaugcaacugagau

SEQ ID NO: 3781 - RNA, 19 nt, Influenza A virus
agaagaaauaaggcgaauc

SEQ ID NO: 3782 - RNA, 19 nt, Influenza A virus
cgccagaaugcaacugaga

SEQ ID NO: 3783 - RNA, 19 nt, Influenza A virus
gugcucucugcuuuugaug

SEQ ID NO: 3784 - RNA, 19 nt, Influenza A virus
ggugcucucugcuuuugau

SEQ ID NO: 3785 - RNA, 19 nt, Influenza A virus
ugcucucugcuuuugauga

SEQ ID NO: 3786 - RNA, 19 nt, Influenza A virus
gaagaugauugauggaauu

SEQ ID NO: 3787 - RNA, 19 nt, Influenza A virus
auccgucgggaagaugauu

SEQ ID NO: 3788 - RNA, 19 nt, Influenza A virus
cauccgucgggaagaugau

SEQ ID NO: 3789 - RNA, 19 nt, Influenza A virus
ucgggaagaugauugaugg

SEQ ID NO: 3790 - RNA, 19 nt, Influenza A virus
cgggaagaugauugaugga

SEQ ID NO: 3791 - RNA, 19 nt, Influenza A virus
aaggcaacgaacccgaucg

SEQ ID NO: 3792 - RNA, 19 nt, Influenza A virus
aggcaacgaacccgaucgu

SEQ ID NO: 3793 - RNA, 19 nt, Influenza A virus
ggucaguugcucacaaauc

SEQ ID NO: 3794 - RNA, 19 nt, Influenza A virus
gggucaguugcucacaaau

SEQ ID NO: 3795 - RNA, 19 nt, Influenza A virus
gucgggaagaugauugaug

SEQ ID NO: 3796 - RNA, 19 nt, Influenza A virus
agggucaguugcucacaaa

SEQ ID NO: 3797 - RNA, 19 nt, Influenza A virus
uccgucgggaagaugauug

SEQ ID NO: 3798 - RNA, 19 nt, Influenza A virus
aaagaaaccucccauuuga

SEQ ID NO: 3799 - RNA, 19 nt, Influenza A virus
cgucgggaagaugauugau

SEQ ID NO: 3800 - RNA, 19 nt, Influenza A virus
caaagaaaccucccauuug

SEQ ID NO: 3801 - RNA, 19 nt, Influenza A virus
ccgucgggaagaugauuga

SEQ ID NO: 3802 - RNA, 19 nt, Influenza A virus
ugagggcagaaaucauaag

SEQ ID NO: 3803 - RNA, 19 nt, Influenza A virus
ggaauagacccuuucaaac

SEQ ID NO: 3804 - RNA, 19 nt, Influenza A virus
gaauagacccuuucaaacu

SEQ ID NO: 3805 - RNA, 19 nt, Influenza A virus
gugggaauagacccuuuca

SEQ ID NO: 3806 - RNA, 19 nt, Influenza A virus
ugggaauagacccuuucaa

SEQ ID NO: 3807 - RNA, 19 nt, Influenza A virus
gucaguugcucacaaaucu

SEQ ID NO: 3808 - RNA, 19 nt, Influenza A virus
gggaauagacccuuucaaa

SEQ ID NO: 3809 - RNA, 19 nt, Influenza A virus
ggacaagagcucuuguucg

SEQ ID NO: 3810 - RNA, 19 nt, Influenza A virus
aggacaagagcucuuguuc

SEQ ID NO: 3811 - RNA, 19 nt, Influenza A virus
ucuggagaggugagaaugg

SEQ ID NO: 3812 - RNA, 19 nt, Influenza A virus
uucuggagaggugagaaug

SEQ ID NO: 3813 - RNA, 19 nt, Influenza A virus
cccagcgcggggaaagauc

SEQ ID NO: 3814 - RNA, 19 nt, Influenza A virus
ccagcgcggggaaagaucc

SEQ ID NO: 3815 - RNA, 19 nt, Influenza A virus
uacugggccauaaggacca

SEQ ID NO: 3816 - RNA, 19 nt, Influenza A virus
acugggccauaaggaccag

SEQ ID NO: 3817 - RNA, 19 nt, Influenza A virus
gaggacaagagcucuuguu

SEQ ID NO: 3818 - RNA, 19 nt, Influenza A virus
auggcgucccaaggcacca

SEQ ID NO: 3819 - RNA, 19 nt, Influenza A virus
uggcgucccaaggcaccaa

SEQ ID NO: 3820 - RNA, 19 nt, Influenza A virus
cgucccaaggcaccaaacg

SEQ ID NO: 3821 - RNA, 19 nt, Influenza A virus
ggcgucccaaggcaccaaa

SEQ ID NO: 3822 - RNA, 19 nt, Influenza A virus
gcgucccaaggcaccaaac

SEQ ID NO: 3823 - RNA, 19 nt, Influenza A virus
ugugcacugaacuuaaacu

SEQ ID NO: 3824 - RNA, 19 nt, Influenza A virus
gugcacugaacuuaaacuc

SEQ ID NO: 3825 - RNA, 19 nt, Influenza A virus
augugcacugaacuuaaac

SEQ ID NO: 3826 - RNA, 19 nt, Influenza A virus
ccaaggcaccaaacggucu

SEQ ID NO: 3827 - RNA, 19 nt, Influenza A virus
cacugaacuuaaacucagu

SEQ ID NO: 3828 - RNA, 19 nt, Influenza A virus
ugcacugaacuuaaacuca

SEQ ID NO: 3829 - RNA, 19 nt, Influenza A virus
gcacugaacuuaaacucag

SEQ ID NO: 3830 - RNA, 19 nt, Influenza A virus
cccaaggcaccaaacgguc

SEQ ID NO: 3831 - RNA, 19 nt, Influenza A virus
ucccaaggcaccaaacggu

SEQ ID NO: 3832 - RNA, 19 nt, Influenza A virus
agaucgaagaucucauauu

SEQ ID NO: 3833 - RNA, 19 nt, Influenza A virus
gagaucgaagaucucauau

SEQ ID NO: 3834 - RNA, 19 nt, Influenza A virus
ugagaucgaagaucucaua

SEQ ID NO: 3835 - RNA, 19 nt, Influenza A virus
gucccaaggcaccaaacgg

SEQ ID NO: 3836 - RNA, 19 nt, Influenza A virus
guacugggccauaaggacc

SEQ ID NO: 3837 - RNA, 19 nt, Influenza A virus
ugguguggauggcaugcca

SEQ ID NO: 3838 - RNA, 19 nt, Influenza A virus
gugcuuaugagagaaugug

SEQ ID NO: 3839 - RNA, 19 nt, Influenza A virus
gguacugggccauaaggac

SEQ ID NO: 3840 - RNA, 19 nt, Influenza A virus
guguggauggcaugccauu

SEQ ID NO: 3841 - RNA, 19 nt, Influenza A virus
uguggauggcaugccauuc

SEQ ID NO: 3842 - RNA, 19 nt, Influenza A virus
gguguggauggcaugccau

SEQ ID NO: 3843 - RNA, 19 nt, Influenza A virus
cauaccagaggacaagagc

SEQ ID NO: 3844 - RNA, 19 nt, Influenza A virus
caacauaccagaggacaag

SEQ ID NO: 3845 - RNA, 19 nt, Influenza A virus
acauaccagaggacaagag

SEQ ID NO: 3846 - RNA, 19 nt, Influenza A virus
cugguguggauggcaugcc

SEQ ID NO: 3847 - RNA, 19 nt, Influenza A virus
aacauaccagaggacaaga

SEQ ID NO: 3848 - RNA, 19 nt, Influenza A virus
auaccagaggacaagagcu

SEQ ID NO: 3849 - RNA, 19 nt, Influenza A virus
acauccaaaugugcacuga

SEQ ID NO: 3850 - RNA, 19 nt, Influenza A virus
uacauccaaaugugcacug

SEQ ID NO: 3851 - RNA, 19 nt, Influenza A virus
cuacauccaaaugugcacu

SEQ ID NO: 3852 - RNA, 19 nt, Influenza A virus
gaucgaagaucucauauuu

SEQ ID NO: 3853 - RNA, 19 nt, Influenza A virus
auccaaaugugcacugaac

SEQ ID NO: 3854 - RNA, 19 nt, Influenza A virus
ccuuucaaacuacuucaaa

SEQ ID NO: 3855 - RNA, 19 nt, Influenza A virus
uccaaaugugcacugaacu

SEQ ID NO: 3856 - RNA, 19 nt, Influenza A virus
cauccaaaugugcacugaa

SEQ ID NO: 3857 - RNA, 19 nt, Influenza A virus
caaaugugcacugaacuua

SEQ ID NO: 3858 - RNA, 19 nt, Influenza A virus
aaaugugcacugaacuuaa

SEQ ID NO: 3859 - RNA, 19 nt, Influenza A virus
cuuucaaacuacuucaaaa

SEQ ID NO: 3860 - RNA, 19 nt, Influenza A virus
aaugugcacugaacuuaaa

SEQ ID NO: 3861 - RNA, 19 nt, Influenza A virus
uacucuugaacugagaagc

SEQ ID NO: 3862 - RNA, 19 nt, Influenza A virus
gugacaucaaaaucauggc

SEQ ID NO: 3863 - RNA, 19 nt, Influenza A virus
ugacaucaaaaucauggcg

SEQ ID NO: 3864 - RNA, 19 nt, Influenza A virus
acaucaaaaucauggcguc

SEQ ID NO: 3865 - RNA, 19 nt, Influenza A virus
gacaucaaaaucauggcgu

SEQ ID NO: 3866 - RNA, 19 nt, Influenza A virus
ccaggaguggaggaaacac

SEQ ID NO: 3867 - RNA, 19 nt, Influenza A virus
accaggaguggaggaaaca

SEQ ID NO: 3868 - RNA, 19 nt, Influenza A virus
agugacaucaaaaucaugg

SEQ ID NO: 3869 - RNA, 19 nt, Influenza A virus
gacccuuucaaacuacuuc

SEQ ID NO: 3870 - RNA, 19 nt, Influenza A virus
guacucuugaacugagaag

SEQ ID NO: 3871 - RNA, 19 nt, Influenza A virus
acccuuucaaacuacuuca

SEQ ID NO: 3872 - RNA, 19 nt, Influenza A virus
aguacucuugaacugagaa

SEQ ID NO: 3873 - RNA, 19 nt, Influenza A virus
gagugacaucaaaaucaug

SEQ ID NO: 3874 - RNA, 19 nt, Influenza A virus
cccuuucaaacuacuucaa

SEQ ID NO: 3875 - RNA, 19 nt, Influenza A virus
ccaaaugugcacugaacuu

SEQ ID NO: 3876 - RNA, 19 nt, Influenza A virus
agugcuuaugagagaaugu

SEQ ID NO: 3877 - RNA, 19 nt, Influenza A virus
ggauggcaugccauucugc

SEQ ID NO: 3878 - RNA, 19 nt, Influenza A virus
uggauggcaugccauucug

SEQ ID NO: 3879 - RNA, 19 nt, Influenza A virus
cuucaaaugagaacaugga

SEQ ID NO: 3880 - RNA, 19 nt, Influenza A virus
caaauugcuucaaaugaga

SEQ ID NO: 3881 - RNA, 19 nt, Influenza A virus
gcuucaaaugagaacaugg

SEQ ID NO: 3882 - RNA, 19 nt, Influenza A virus
aaauugcuucaaaugagaa

SEQ ID NO: 3883 - RNA, 19 nt, Influenza A virus
auugcuucaaaugagaaca

SEQ ID NO: 3884 - RNA, 19 nt, Influenza A virus
ugagugacaucaaaaucau

SEQ ID NO: 3885 - RNA, 19 nt, Influenza A virus
uugcuucaaaugagaacau

SEQ ID NO: 3886 - RNA, 19 nt, Influenza A virus
aauugcuucaaaugagaac

SEQ ID NO: 3887 - RNA, 19 nt, Influenza A virus
aacagagggccuccgcagg

SEQ ID NO: 3888 - RNA, 19 nt, Influenza A virus
ugcuucaaaugagaacaug

SEQ ID NO: 3889 - RNA, 19 nt, Influenza A virus
agggccuccgcaggccaaa

SEQ ID NO: 3890 - RNA, 19 nt, Influenza A virus
caacagagggccuccgcag

SEQ ID NO: 3891 - RNA, 19 nt, Influenza A virus
uagacccuuucaaacuacu

SEQ ID NO: 3892 - RNA, 19 nt, Influenza A virus
aaucaacagagggccuccg

SEQ ID NO: 3893 - RNA, 19 nt, Influenza A virus
aucaacagagggccuccgc

SEQ ID NO: 3894 - RNA, 19 nt, Influenza A virus
ucaacagagggccuccgca

SEQ ID NO: 3895 - RNA, 19 nt, Influenza A virus
agacccuuucaaacuacuu

SEQ ID NO: 3896 - RNA, 19 nt, Influenza A virus
ggggaguuuucgagcucuc

SEQ ID NO: 3897 - RNA, 19 nt, Influenza A virus
auagacccuuucaaacuac

SEQ ID NO: 3898 - RNA, 19 nt, Influenza A virus
gaguuuucgagcucucaga

SEQ ID NO: 3899 - RNA, 19 nt, Influenza A virus
acagagggccuccgcaggc

SEQ ID NO: 3900 - RNA, 19 nt, Influenza A virus
ggaguuuucgagcucucag

SEQ ID NO: 3901 - RNA, 19 nt, Influenza A virus
cagagggccuccgcaggcc

SEQ ID NO: 3902 - RNA, 19 nt, Influenza A virus
agagggccuccgcaggcca

SEQ ID NO: 3903 - RNA, 19 nt, Influenza A virus
aauagacccuuucaaacua

SEQ ID NO: 3904 - RNA, 19 nt, Influenza A virus
gggaguuuucgagcucuca

SEQ ID NO: 3905 - RNA, 19 nt, Influenza A virus
ucacugagugacaucaaaa

SEQ ID NO: 3906 - RNA, 19 nt, Influenza A virus
gagggccuccgcaggccaa

SEQ ID NO: 3907 - RNA, 19 nt, Influenza A virus
uaaucaacagagggccucc

SEQ ID NO: 3908 - RNA, 19 nt, Influenza A virus
cugagugacaucaaaauca

SEQ ID NO: 3909 - RNA, 19 nt, Influenza A virus
acugagugacaucaaaauc

SEQ ID NO: 3910 - RNA, 19 nt, Influenza A virus
cacugagugacaucaaaau

SEQ ID NO: 3911 - RNA, 19 nt, Influenza A virus
aucgaagaucucauauuuu

SEQ ID NO: 3912 - RNA, 19 nt, Influenza A virus
uuguuaagcuucaucagag

SEQ ID NO: 3913 - RNA, 19 nt, Influenza A virus
gaugauugauggaauuggg

SEQ ID NO: 3914 - RNA, 19 nt, Influenza A virus
uguuaagcuucaucagagg

SEQ ID NO: 3915 - RNA, 19 nt, Influenza A virus
uucgaaaaagagggauauu

SEQ ID NO: 3916 - RNA, 19 nt, Influenza A virus
ucgaaaaagagggauauuc

SEQ ID NO: 3917 - RNA, 19 nt, Influenza A virus
acaaauugcuucaaaugag

SEQ ID NO: 3918 - RNA, 19 nt, Influenza A virus
aggaguggaggaaacacua

SEQ ID NO: 3919 - RNA, 19 nt, Influenza A virus
gaguggaggaaacacuaau

SEQ ID NO: 3920 - RNA, 19 nt, Influenza A virus
ggaguggaggaaacacuaa

SEQ ID NO: 3921 - RNA, 19 nt, Influenza A virus
caggaguggaggaaacacu

SEQ ID NO: 3922 - RNA, 19 nt, Influenza A virus
ucaaacgggggaucaacga

SEQ ID NO: 3923 - RNA, 19 nt, Influenza A virus
caaacgggggaucaacgau

SEQ ID NO: 3924 - RNA, 19 nt, Influenza A virus
cuuaaacucagugauuaug

SEQ ID NO: 3925 - RNA, 19 nt, Influenza A virus
agaaugcaacugagauuag

SEQ ID NO: 3926 - RNA, 19 nt, Influenza A virus
cagaaugcaacugagauua

SEQ ID NO: 3927 - RNA, 19 nt, Influenza A virus
uuaaacucagugauuauga

SEQ ID NO: 3928 - RNA, 19 nt, Influenza A virus
aaacgggggaucaacgauc

SEQ ID NO: 3929 - RNA, 19 nt, Influenza A virus
aacgggggaucaacgaucg

SEQ ID NO: 3930 - RNA, 19 nt, Influenza A virus
ucaaaugagaacauggaua

SEQ ID NO: 3931 - RNA, 19 nt, Influenza A virus
guuaagcuucaucagaggg

SEQ ID NO: 3932 - RNA, 19 nt, Influenza A virus
uucaaaugagaacauggau

SEQ ID NO: 3933 - RNA, 19 nt, Influenza A virus
cucacaugaugaucuggca

SEQ ID NO: 3934 - RNA, 19 nt, Influenza A virus
gaaggugcaaaaccagaag

SEQ ID NO: 3935 - RNA, 19 nt, Influenza A virus
cuucggagacaaugcagaa

SEQ ID NO: 3936 - RNA, 19 nt, Influenza A virus
ggaaggugcaaaaccagaa

SEQ ID NO: 3937 - RNA, 19 nt, Influenza A virus
aaggugcaaaaccagaaga

SEQ ID NO: 3938 - RNA, 19 nt, Influenza A virus
acucacaugaugaucuggc

SEQ ID NO: 3939 - RNA, 19 nt, Influenza A virus
aggugcaaaaccagaagaa

SEQ ID NO: 3940 - RNA, 19 nt, Influenza A virus
guggauggcaugccauucu

SEQ ID NO: 3941 - RNA, 19 nt, Influenza A virus
auggcaugccauucugcug

SEQ ID NO: 3942 - RNA, 19 nt, Influenza A virus
uggcaugccauucugcugc

SEQ ID NO: 3943 - RNA, 19 nt, Influenza A virus
gauggcaugccauucugcu

SEQ ID NO: 3944 - RNA, 19 nt, Influenza A virus
gaacuuaaacucagugauu

SEQ ID NO: 3945 - RNA, 19 nt, Influenza A virus
acuuaaacucagugauuau

SEQ ID NO: 3946 - RNA, 19 nt, Influenza A virus
uucggagacaaugcagaag

SEQ ID NO: 3947 - RNA, 19 nt, Influenza A virus
auccuaagaaaacuggagg

SEQ ID NO: 3948 - RNA, 19 nt, Influenza A virus
ccagaaugcaacugagauu

SEQ ID NO: 3949 - RNA, 19 nt, Influenza A virus
cucacugagugacaucaaa

SEQ ID NO: 3950 - RNA, 19 nt, Influenza A virus
ucggagacaaugcagaaga

SEQ ID NO: 3951 - RNA, 19 nt, Influenza A virus
aacuuaaacucagugauua

SEQ ID NO: 3952 - RNA, 19 nt, Influenza A virus
gauccuaagaaaacuggag

SEQ ID NO: 3953 - RNA, 19 nt, Influenza A virus
cagcuggucuaacucacau

SEQ ID NO: 3954 - RNA, 19 nt, Influenza A virus
gaaugcaacugagauuagg

SEQ ID NO: 3955 - RNA, 19 nt, Influenza A virus
acagcuggucuaacucaca

SEQ ID NO: 3956 - RNA, 19 nt, Influenza A virus
cauucugcugcauuugaag

SEQ ID NO: 3957 - RNA, 19 nt, Influenza A virus
augccauucugcugcauuu

SEQ ID NO: 3958 - RNA, 19 nt, Influenza A virus
gccauucugcugcauuuga

SEQ ID NO: 3959 - RNA, 19 nt, Influenza A virus
caugccauucugcugcauu

SEQ ID NO: 3960 - RNA, 19 nt, Influenza A virus
ccauucugcugcauuugaa

SEQ ID NO: 3961 - RNA, 19 nt, Influenza A virus
ugccauucugcugcauuug

SEQ ID NO: 3962 - RNA, 19 nt, Influenza A virus
gcaugccauucugcugcau

SEQ ID NO: 3963 - RNA, 19 nt, Influenza A virus
ggcaugccauucugcugca

SEQ ID NO: 3964 - RNA, 19 nt, Influenza A virus
uggagaggugagaaugggc

SEQ ID NO: 3965 - RNA, 19 nt, Influenza A virus
ggagaggugagaaugggcg

SEQ ID NO: 3966 - RNA, 19 nt, Influenza A virus
cuggagaggugagaauggg

SEQ ID NO: 3967 - RNA, 19 nt, Influenza A virus
caaaugagaacauggauaa

SEQ ID NO: 3968 - RNA, 19 nt, Influenza A virus
uaaggaccaggaguggagg

SEQ ID NO: 3969 - RNA, 19 nt, Influenza A virus
auaaggaccaggaguggag

SEQ ID NO: 3970 - RNA, 19 nt, Influenza A virus
aaggaccaggaguggagga

SEQ ID NO: 3971 - RNA, 19 nt, Influenza A virus
aggaccaggaguggaggaa

SEQ ID NO: 3972 - RNA, 19 nt, Influenza A virus
gaaaaagagggauauuccu

SEQ ID NO: 3973 - RNA, 19 nt, Influenza A virus
cggagacaaugcagaagag

SEQ ID NO: 3974 - RNA, 19 nt, Influenza A virus
cgaaaaagagggauauucc

SEQ ID NO: 3975 - RNA, 19 nt, Influenza A virus
gccuguguguauggaccug

SEQ ID NO: 3976 - RNA, 19 nt, Influenza A virus
aaaaagagggauauuccuu

SEQ ID NO: 3977 - RNA, 19 nt, Influenza A virus
ccuguguguauggaccugc

SEQ ID NO: 3978 - RNA, 19 nt, Influenza A virus
gagaaagucggaacccagg

SEQ ID NO: 3979 - RNA, 19 nt, Influenza A virus
agagaaagucggaacccag

SEQ ID NO: 3980 - RNA, 19 nt, Influenza A virus
aaaugagaacauggauaau

SEQ ID NO: 3981 - RNA, 19 nt, Influenza A virus
cuucgaaaaagagggauau

SEQ ID NO: 3982 - RNA, 19 nt, Influenza A virus
ggaccaggaguggaggaaa

SEQ ID NO: 3983 - RNA, 19 nt, Influenza A virus
uuuucgagcucucagacga

SEQ ID NO: 3984 - RNA, 19 nt, Influenza A virus
cugcagucaaaggaaucgg

SEQ ID NO: 3985 - RNA, 19 nt, Influenza A virus
aguuuucgagcucucagac

SEQ ID NO: 3986 - RNA, 19 nt, Influenza A virus
gaaagucggaacccaggaa

SEQ ID NO: 3987 - RNA, 19 nt, Influenza A virus
guuuucgagcucucagacg

SEQ ID NO: 3988 - RNA, 19 nt, Influenza A virus
gcugcagucaaaggaaucg

SEQ ID NO: 3989 - RNA, 19 nt, Influenza A virus
agaaagucggaacccagga

SEQ ID NO: 3990 - RNA, 19 nt, Influenza A virus
aaagucggaacccaggaaa

SEQ ID NO: 3991 - RNA, 19 nt, Influenza A virus
aacagcuugacaauagaga

SEQ ID NO: 3992 - RNA, 19 nt, Influenza A virus
ggagacaaugcagaagagu

SEQ ID NO: 3993 - RNA, 19 nt, Influenza A virus
agauuguuaagcuucauca

SEQ ID NO: 3994 - RNA, 19 nt, Influenza A virus
gauuguuaagcuucaucag

SEQ ID NO: 3995 - RNA, 19 nt, Influenza A virus
uggaagaacaccccagcgc

SEQ ID NO: 3996 - RNA, 19 nt, Influenza A virus
cugccuguguguauggacc

SEQ ID NO: 3997 - RNA, 19 nt, Influenza A virus
cuggaagaacaccccagcg

SEQ ID NO: 3998 - RNA, 19 nt, Influenza A virus
gagacaaugcagaagagua

SEQ ID NO: 3999 - RNA, 19 nt, Influenza A virus
aaugagaacauggauaaua

SEQ ID NO: 4000 - RNA, 19 nt, Influenza A virus
augagaacauggauaauau

SEQ ID NO: 4001 - RNA, 19 nt, Influenza A virus
ccugccuguguguauggac

SEQ ID NO: 4002 - RNA, 19 nt, Influenza A virus
caggcucauggccugaugg

SEQ ID NO: 4003 - RNA, 19 nt, Influenza A virus
guggaccucaaacaguauu

SEQ ID NO: 4004 - RNA, 19 nt, Influenza A virus
uagcaugguccagcucaag

SEQ ID NO: 4005 - RNA, 19 nt, Influenza A virus
uggaccucaaacaguauug

SEQ ID NO: 4006 - RNA, 19 nt, Influenza A virus
acaggcucauggccugaug

SEQ ID NO: 4007 - RNA, 19 nt, Influenza A virus
ggaccucaaacaguauugu

SEQ ID NO: 4008 - RNA, 19 nt, Influenza A virus
ugguccagcucaaguuguc

SEQ ID NO: 4009 - RNA, 19 nt, Influenza A virus
gaccucaaacaguauuguu

SEQ ID NO: 4010 - RNA, 19 nt, Influenza A virus
gguccagcucaaguuguca

SEQ ID NO: 4011 - RNA, 19 nt, Influenza A virus
caugguccagcucaaguug

SEQ ID NO: 4012 - RNA, 19 nt, Influenza A virus
gcaugguccagcucaaguu

SEQ ID NO: 4013 - RNA, 19 nt, Influenza A virus
accucaaacaguauuguug

SEQ ID NO: 4014 - RNA, 19 nt, Influenza A virus
agcaugguccagcucaagu

SEQ ID NO: 4015 - RNA, 19 nt, Influenza A virus
augguccagcucaaguugu

SEQ ID NO: 4016 - RNA, 19 nt, Influenza A virus
ccaguuaugugugcucagg

SEQ ID NO: 4017 - RNA, 19 nt, Influenza A virus
caaacaguauuguuguguu

SEQ ID NO: 4018 - RNA, 19 nt, Influenza A virus
ucaaacaguauuguugugu

SEQ ID NO: 4019 - RNA, 19 nt, Influenza A virus
ccucaaacaguauuguugu

SEQ ID NO: 4020 - RNA, 19 nt, Influenza A virus
uccaguuaugugugcucag

SEQ ID NO: 4021 - RNA, 19 nt, Influenza A virus
uuccaguuaugugugcuca

SEQ ID NO: 4022 - RNA, 19 nt, Influenza A virus
ucugcagagacaacuggaa

SEQ ID NO: 4023 - RNA, 19 nt, Influenza A virus
ugcagagacaacuggaaag

SEQ ID NO: 4024 - RNA, 19 nt, Influenza A virus
gcagagacaacuggaaagg

SEQ ID NO: 4025 - RNA, 19 nt, Influenza A virus
cucaaacaguauuguugug

SEQ ID NO: 4026 - RNA, 19 nt, Influenza A virus
cugcagagacaacuggaaa

SEQ ID NO: 4027 - RNA, 19 nt, Influenza A virus
guccagcucaaguugucac

SEQ ID NO: 4028 - RNA, 19 nt, Influenza A virus
gagacaacuggaaaggcuc

SEQ ID NO: 4029 - RNA, 19 nt, Influenza A virus
gcucaaguugucacgaugg

SEQ ID NO: 4030 - RNA, 19 nt, Influenza A virus
ccagcucaaguugucacga

SEQ ID NO: 4031 - RNA, 19 nt, Influenza A virus
uccagcucaaguugucacg

SEQ ID NO: 4032 - RNA, 19 nt, Influenza A virus
caguaguaaugacugaugg

SEQ ID NO: 4033 - RNA, 19 nt, Influenza A virus
cagcucaaguugucacgau

SEQ ID NO: 4034 - RNA, 19 nt, Influenza A virus
agagacaacuggaaaggcu

SEQ ID NO: 4035 - RNA, 19 nt, Influenza A virus
agcucaaguugucacgaug

SEQ ID NO: 4036 - RNA, 19 nt, Influenza A virus
cagagacaacuggaaaggc

SEQ ID NO: 4037 - RNA, 19 nt, Influenza A virus
gaaugcguuuguaucaaug

SEQ ID NO: 4038 - RNA, 19 nt, Influenza A virus
aaugcguuuguaucaaugg

SEQ ID NO: 4039 - RNA, 19 nt, Influenza A virus
aguauuguuguguuuugug

SEQ ID NO: 4040 - RNA, 19 nt, Influenza A virus
guauuguuguguuuugugg

SEQ ID NO: 4041 - RNA, 19 nt, Influenza A virus
ucaaguugucacgauggaa

SEQ ID NO: 4042 - RNA, 19 nt, Influenza A virus
guugucacgauggaaaagc

SEQ ID NO: 4043 - RNA, 19 nt, Influenza A virus
caguauuguuguguuuugu

SEQ ID NO: 4044 - RNA, 19 nt, Influenza A virus
auuggucaaagccgcaaug

SEQ ID NO: 4045 - RNA, 19 nt, Influenza A virus
caaguugucacgauggaaa

SEQ ID NO: 4046 - RNA, 19 nt, Influenza A virus
acaguauuguuguguuuug

SEQ ID NO: 4047 - RNA, 19 nt, Influenza A virus
aacaguauuguuguguuuu

SEQ ID NO: 4048 - RNA, 19 nt, Influenza A virus
aauuggucaaagccgcaau

SEQ ID NO: 4049 - RNA, 19 nt, Influenza A virus
aaacaguauuguuguguuu

SEQ ID NO: 4050 - RNA, 19 nt, Influenza A virus
aguugucacgauggaaaag

SEQ ID NO: 4051 - RNA, 19 nt, Influenza A virus
cucaaguugucacgaugga

SEQ ID NO: 4052 - RNA, 19 nt, Influenza A virus
aaguugucacgauggaaaa

SEQ ID NO: 4053 - RNA, 19 nt, Influenza A virus
caacugcuagcuucauuua

SEQ ID NO: 4054 - RNA, 19 nt, Influenza A virus
gcaacugcuagcuucauuu

SEQ ID NO: 4055 - RNA, 19 nt, Influenza A virus
aaugcaacugcuagcuuca

SEQ ID NO: 4056 - RNA, 19 nt, Influenza A virus
ugcaacugcuagcuucauu

SEQ ID NO: 4057 - RNA, 19 nt, Influenza A virus
augcaacugcuagcuucau

SEQ ID NO: 4058 - RNA, 19 nt, Influenza A virus
gaaccuuaugugucaugcg

SEQ ID NO: 4059 - RNA, 19 nt, Influenza A virus
aaccuuaugugucaugcga

SEQ ID NO: 4060 - RNA, 19 nt, Influenza A virus
aauccaaaucaaaagauaa

SEQ ID NO: 4061 - RNA, 19 nt, Influenza A virus
auccaaaucaaaagauaau

SEQ ID NO: 4062 - RNA, 19 nt, Influenza A virus
aaaugcaacugcuagcuuc

SEQ ID NO: 4063 - RNA, 19 nt, Influenza A virus
uccaaaucaaaagauaaua

SEQ ID NO: 4064 - RNA, 19 nt, Influenza A virus
caaaucaaaagauaauaac

SEQ ID NO: 4065 - RNA, 19 nt, Influenza A virus
auagcaugguccagcucaa

SEQ ID NO: 4066 - RNA, 19 nt, Influenza A virus
ccaaaucaaaagauaauaa

SEQ ID NO: 4067 - RNA, 19 nt, Influenza A virus
acaguaguaaugacugaug

SEQ ID NO: 4068 - RNA, 19 nt, Influenza A virus
gucacgauggaaaagcaug

SEQ ID NO: 4069 - RNA, 19 nt, Influenza A virus
uuggucaaagccgcaaugu

SEQ ID NO: 4070 - RNA, 19 nt, Influenza A virus
guggaguugauaaggggaa

SEQ ID NO: 4071 - RNA, 19 nt, Influenza A virus
ucacgauggaaaagcaugg

SEQ ID NO: 4072 - RNA, 19 nt, Influenza A virus
uggaguugauaaggggaag

SEQ ID NO: 4073 - RNA, 19 nt, Influenza A virus
ugucacgauggaaaagcau

SEQ ID NO: 4074 - RNA, 19 nt, Influenza A virus
gagaaccuuaugugucaug

SEQ ID NO: 4075 - RNA, 19 nt, Influenza A virus
agagaaccuuaugugucau

SEQ ID NO: 4076 - RNA, 19 nt, Influenza A virus
uugucacgauggaaaagca

SEQ ID NO: 4077 - RNA, 19 nt, Influenza A virus
accuuaugugucaugcgau

SEQ ID NO: 4078 - RNA, 19 nt, Influenza A virus
ccuuaugugucaugcgauc

SEQ ID NO: 4079 - RNA, 19 nt, Influenza A virus
aggcucauggccugauggg

SEQ ID NO: 4080 - RNA, 19 nt, Influenza A virus
uuuuauguggaguugauaa

SEQ ID NO: 4081 - RNA, 19 nt, Influenza A virus
ggcucauggccugaugggg

SEQ ID NO: 4082 - RNA, 19 nt, Influenza A virus
uuuauguggaguugauaag

SEQ ID NO: 4083 - RNA, 19 nt, Influenza A virus
ggugcuuuuauguggaguu

SEQ ID NO: 4084 - RNA, 19 nt, Influenza A virus
acguguggaugggaagaac

SEQ ID NO: 4085 - RNA, 19 nt, Influenza A virus
aacauaacagagauagugu

SEQ ID NO: 4086 - RNA, 19 nt, Influenza A virus
acauaacagagauagugua

SEQ ID NO: 4087 - RNA, 19 nt, Influenza A virus
augacguguggaugggaag

SEQ ID NO: 4088 - RNA, 19 nt, Influenza A virus
uauuguuguguuuuguggc

SEQ ID NO: 4089 - RNA, 19 nt, Influenza A virus
ugacguguggaugggaaga

SEQ ID NO: 4090 - RNA, 19 nt, Influenza A virus
gacguguggaugggaagaa

SEQ ID NO: 4091 - RNA, 19 nt, Influenza A virus
auuguuguguuuuguggca

SEQ ID NO: 4092 - RNA, 19 nt, Influenza A virus
uuguuguguuuuguggcac

SEQ ID NO: 4093 - RNA, 19 nt, Influenza A virus
uacagaaauuggucaaagc

SEQ ID NO: 4094 - RNA, 19 nt, Influenza A virus
aaaaugcaacugcuagcuu

SEQ ID NO: 4095 - RNA, 19 nt, Influenza A virus
acagaaauuggucaaagcc

SEQ ID NO: 4096 - RNA, 19 nt, Influenza A virus
auguggaguugauaagggg

SEQ ID NO: 4097 - RNA, 19 nt, Influenza A virus
gcuuuuauguggaguugau

SEQ ID NO: 4098 - RNA, 19 nt, Influenza A virus
uauguggaguugauaaggg

SEQ ID NO: 4099 - RNA, 19 nt, Influenza A virus
uguggaguugauaagggga

SEQ ID NO: 4100 - RNA, 19 nt, Influenza A virus
cuuuuauguggaguugaua

SEQ ID NO: 4101 - RNA, 19 nt, Influenza A virus
gugcuuuuauguggaguug

SEQ ID NO: 4102 - RNA, 19 nt, Influenza A virus
ugcuuuuauguggaguuga

SEQ ID NO: 4103 - RNA, 19 nt, Influenza A virus
uguggaugggaagaacgau

SEQ ID NO: 4104 - RNA, 19 nt, Influenza A virus
agaaccuuaugugucaugc

SEQ ID NO: 4105 - RNA, 19 nt, Influenza A virus
uuauguggaguugauaagg

SEQ ID NO: 4106 - RNA, 19 nt, Influenza A virus
auuacaggauuugcaccuu

SEQ ID NO: 4107 - RNA, 19 nt, Influenza A virus
auacagaaauuggucaaag

SEQ ID NO: 4108 - RNA, 19 nt, Influenza A virus
uuacaggauuugcaccuuu

SEQ ID NO: 4109 - RNA, 19 nt, Influenza A virus
aaagcauggcugcauguuu

SEQ ID NO: 4110 - RNA, 19 nt, Influenza A virus
aagcauggcugcauguuug

SEQ ID NO: 4111 - RNA, 19 nt, Influenza A virus
guguggaugggaagaacga

SEQ ID NO: 4112 - RNA, 19 nt, Influenza A virus
agcauggcugcauguuugu

SEQ ID NO: 4113 - RNA, 19 nt, Influenza A virus
auggaacaggcucauggcc

SEQ ID NO: 4114 - RNA, 19 nt, Influenza A virus
uauggaacaggcucauggc

SEQ ID NO: 4115 - RNA, 19 nt, Influenza A virus
gcucauggccugauggggc

SEQ ID NO: 4116 - RNA, 19 nt, Influenza A virus
gaauacagaaauuggucaa

SEQ ID NO: 4117 - RNA, 19 nt, Influenza A virus
aauacagaaauuggucaaa

SEQ ID NO: 4118 - RNA, 19 nt, Influenza A virus
uggaacaggcucauggccu

SEQ ID NO: 4119 - RNA, 19 nt, Influenza A virus
gaaauuggucaaagccgca

SEQ ID NO: 4120 - RNA, 19 nt, Influenza A virus
ggaacaggcucauggccug

SEQ ID NO: 4121 - RNA, 19 nt, Influenza A virus
agaaauuggucaaagccgc

SEQ ID NO: 4122 - RNA, 19 nt, Influenza A virus
gaacaggcucauggccuga

SEQ ID NO: 4123 - RNA, 19 nt, Influenza A virus
cucauggccugauggggcg

SEQ ID NO: 4124 - RNA, 19 nt, Influenza A virus
aaauuggucaaagccgcaa

SEQ ID NO: 4125 - RNA, 19 nt, Influenza A virus
caggauuugcaccuuuuuc

SEQ ID NO: 4126 - RNA, 19 nt, Influenza A virus
acaggauuugcaccuuuuu

SEQ ID NO: 4127 - RNA, 19 nt, Influenza A virus
aacaggcucauggccugau

SEQ ID NO: 4128 - RNA, 19 nt, Influenza A virus
ggaaaagcauggcugcaug

SEQ ID NO: 4129 - RNA, 19 nt, Influenza A virus
gaaaagcauggcugcaugu

SEQ ID NO: 4130 - RNA, 19 nt, Influenza A virus
aaaagcauggcugcauguu

SEQ ID NO: 4131 - RNA, 19 nt, Influenza A virus
uggaaaagcauggcugcau

SEQ ID NO: 4132 - RNA, 19 nt, Influenza A virus
auggaaaagcauggcugca

SEQ ID NO: 4133 - RNA, 19 nt, Influenza A virus
gauggaaaagcauggcugc

SEQ ID NO: 4134 - RNA, 19 nt, Influenza A virus
guggaugggaagaacgauc

SEQ ID NO: 4135 - RNA, 19 nt, Influenza A virus
cagaaauuggucaaagccg

SEQ ID NO: 4136 - RNA, 19 nt, Influenza A virus
uacaggauuugcaccuuuu

SEQ ID NO: 4137 - RNA, 19 nt, Influenza A virus
cguguggaugggaagaacg

SEQ ID NO: 4138 - RNA, 19 nt, Influenza A virus
cauaacagagauaguguau

SEQ ID NO: 4139 - RNA, 19 nt, Influenza A virus
uuaugugucaugcgauccu

SEQ ID NO: 4140 - RNA, 19 nt, Influenza A virus
cuuaugugucaugcgaucc

SEQ ID NO: 4141 - RNA, 19 nt, Influenza A virus
ggauuugcaccuuuuucua

SEQ ID NO: 4142 - RNA, 19 nt, Influenza A virus
cacgauggaaaagcauggc

SEQ ID NO: 4143 - RNA, 19 nt, Influenza A virus
acgauggaaaagcauggcu

SEQ ID NO: 4144 - RNA, 19 nt, Influenza A virus
uggaugggaagaacgauca

SEQ ID NO: 4145 - RNA, 19 nt, Influenza A virus
gauuugcaccuuuuucuaa

SEQ ID NO: 4146 - RNA, 19 nt, Influenza A virus
auuugcaccuuuuucuaag

SEQ ID NO: 4147 - RNA, 19 nt, Influenza A virus
uugcaccuuuuucuaagga

SEQ ID NO: 4148 - RNA, 19 nt, Influenza A virus
cgauggaaaagcauggcug

SEQ ID NO: 4149 - RNA, 19 nt, Influenza A virus
uuugcaccuuuuucuaagg

SEQ ID NO: 4150 - RNA, 19 nt, Influenza A virus
uaugugucaugcgauccug

SEQ ID NO: 4151 - RNA, 19 nt, Influenza A virus
ugaauccaaaucaaaagau

SEQ ID NO: 4152 - RNA, 19 nt, Influenza A virus
augaauccaaaucaaaaga

SEQ ID NO: 4153 - RNA, 19 nt, Influenza A virus
gaauccaaaucaaaagaua

SEQ ID NO: 4154 - RNA, 19 nt, Influenza A virus
ggaugggaagaacgaucag

SEQ ID NO: 4155 - RNA, 19 nt, Influenza A virus
ugaaaggcugggccuuuga

SEQ ID NO: 4156 - RNA, 19 nt, Influenza A virus
gagugaaaggcugggccuu

SEQ ID NO: 4157 - RNA, 19 nt, Influenza A virus
ggagugaaaggcugggccu

SEQ ID NO: 4158 - RNA, 19 nt, Influenza A virus
gugaaaggcugggccuuug

SEQ ID NO: 4159 - RNA, 19 nt, Influenza A virus
ugcaccuuuuucuaaggac

SEQ ID NO: 4160 - RNA, 19 nt, Influenza A virus
gcaccuuuuucuaaggaca

SEQ ID NO: 4161 - RNA, 19 nt, Influenza A virus
caccuuuuucuaaggacaa

SEQ ID NO: 4162 - RNA, 19 nt, Influenza A virus
cauggcugcauguuugugu

SEQ ID NO: 4163 - RNA, 19 nt, Influenza A virus
agugaaaggcugggccuuu

SEQ ID NO: 4164 - RNA, 19 nt, Influenza A virus
gcauggcugcauguuugug

SEQ ID NO: 4165 - RNA, 19 nt, Influenza A virus
accuuuuucuaaggacaau

SEQ ID NO: 4166 - RNA, 19 nt, Influenza A virus
ccuuuuucuaaggacaauu

SEQ ID NO: 4167 - RNA, 19 nt, Influenza A virus
gaugggaagaacgaucagc

SEQ ID NO: 4168 - RNA, 19 nt, Influenza A virus
cuuuuucuaaggacaauuc

SEQ ID NO: 4169 - RNA, 19 nt, Influenza A virus
uaacuacuguaacauugca

SEQ ID NO: 4170 - RNA, 19 nt, Influenza A virus
cuacuguaacauugcauuu

SEQ ID NO: 4171 - RNA, 19 nt, Influenza A virus
acuacuguaacauugcauu

SEQ ID NO: 4172 - RNA, 19 nt, Influenza A virus
aacuacuguaacauugcau

SEQ ID NO: 4173 - RNA, 19 nt, Influenza A virus
gaaaugacguguggauggg

SEQ ID NO: 4174 - RNA, 19 nt, Influenza A virus
ggaaaugacguguggaugg

SEQ ID NO: 4175 - RNA, 19 nt, Influenza A virus
uggaaaugacguguggaug

SEQ ID NO: 4176 - RNA, 19 nt, Influenza A virus
auggaaaugacguguggau

SEQ ID NO: 4177 - RNA, 19 nt, Influenza A virus
gauggaaaugacgugugga

SEQ ID NO: 4178 - RNA, 19 nt, Influenza A virus
aaaugacguguggauggga

SEQ ID NO: 4179 - RNA, 19 nt, Influenza A virus
aaugacguguggaugggaa

SEQ ID NO: 4180 - RNA, 19 nt, Influenza A virus
guacaguaguaaugacuga

SEQ ID NO: 4181 - RNA, 19 nt, Influenza A virus
uguacaguaguaaugacug

SEQ ID NO: 4182 - RNA, 19 nt, Influenza A virus
aggauuugcaccuuuuucu

SEQ ID NO: 4183 - RNA, 19 nt, Influenza A virus
cuuguacaguaguaaugac

SEQ ID NO: 4184 - RNA, 19 nt, Influenza A virus
acuuguacaguaguaauga

SEQ ID NO: 4185 - RNA, 19 nt, Influenza A virus
uacaguaguaaugacugau

SEQ ID NO: 4186 - RNA, 19 nt, Influenza A virus
uuguacaguaguaaugacu

SEQ ID NO: 4187 - RNA, 19 nt, Influenza A virus
aacugcuagcuucauuuac

SEQ ID NO: 4188 - RNA, 19 nt, Influenza A virus
guuauucugguauuuucuc

SEQ ID NO: 4189 - RNA, 19 nt, Influenza A virus
gguuauucugguauuuucu

SEQ ID NO: 4190 - RNA, 19 nt, Influenza A virus
auacuaaaauacuauucau

SEQ ID NO: 4191 - RNA, 19 nt, Influenza A virus
gauacuaaaauacuauuca

SEQ ID NO: 4192 - RNA, 19 nt, Influenza A virus
uacuaaaauacuauucauu

SEQ ID NO: 4193 - RNA, 19 nt, Influenza A virus
augaaaccuucaaagucau

SEQ ID NO: 4194 - RNA, 19 nt, Influenza A virus
ucagaugugucugcagaga

SEQ ID NO: 4195 - RNA, 19 nt, Influenza A virus
cugauacuaaaauacuauu

SEQ ID NO: 4196 - RNA, 19 nt, Influenza A virus
ucaaucucaugccuauaua

SEQ ID NO: 4197 - RNA, 19 nt, Influenza A virus
caggaagugcucagcaugu

SEQ ID NO: 4198 - RNA, 19 nt, Influenza A virus
aucaaucucaugccuauau

SEQ ID NO: 4199 - RNA, 19 nt, Influenza A virus
caaucucaugccuauauaa

SEQ ID NO: 4200 - RNA, 19 nt, Influenza A virus
uaugaaaccuucaaaguca

SEQ ID NO: 4201 - RNA, 19 nt, Influenza A virus
cagaugugucugcagagac

SEQ ID NO: 4202 - RNA, 19 nt, Influenza A virus
gcugauacuaaaauacuau

SEQ ID NO: 4203 - RNA, 19 nt, Influenza A virus
acuaaaauacuauucauug

SEQ ID NO: 4204 - RNA, 19 nt, Influenza A virus
ugauacuaaaauacuauuc

SEQ ID NO: 4205 - RNA, 19 nt, Influenza A virus
agaugugucugcagagaca

SEQ ID NO: 4206 - RNA, 19 nt, Influenza A virus
cuaaaauacuauucauuga

SEQ ID NO: 4207 - RNA, 19 nt, Influenza A virus
gaugugucugcagagacaa

SEQ ID NO: 4208 - RNA, 19 nt, Influenza A virus
ucaggaagugcucagcaug

SEQ ID NO: 4209 - RNA, 19 nt, Influenza A virus
acuguaacauugcauuuca

SEQ ID NO: 4210 - RNA, 19 nt, Influenza A virus
uaacauugcauuucaagca

SEQ ID NO: 4211 - RNA, 19 nt, Influenza A virus
agcugauacuaaaauacua

SEQ ID NO: 4212 - RNA, 19 nt, Influenza A virus
guaacauugcauuucaagc

SEQ ID NO: 4213 - RNA, 19 nt, Influenza A virus
ggaaaggcuccaauaggcc

SEQ ID NO: 4214 - RNA, 19 nt, Influenza A virus
uggaaaggcuccaauaggc

SEQ ID NO: 4215 - RNA, 19 nt, Influenza A virus
acacacccagaaaaaacga

SEQ ID NO: 4216 - RNA, 19 nt, Influenza A virus
uguaacauugcauuucaag

SEQ ID NO: 4217 - RNA, 19 nt, Influenza A virus
cuguaacauugcauuucaa

SEQ ID NO: 4218 - RNA, 19 nt, Influenza A virus
gacacacccagaaaaaacg

SEQ ID NO: 4219 - RNA, 19 nt, Influenza A virus
ugucaggaagugcucagca

SEQ ID NO: 4220 - RNA, 19 nt, Influenza A virus
acacccagaaaaaacgaca

SEQ ID NO: 4221 - RNA, 19 nt, Influenza A virus
ugucugcagagacaacugg

SEQ ID NO: 4222 - RNA, 19 nt, Influenza A virus
ugugucugcagagacaacu

SEQ ID NO: 4223 - RNA, 19 nt, Influenza A virus
cacccagaaaaaacgacag

SEQ ID NO: 4224 - RNA, 19 nt, Influenza A virus
cauggccugauggggcgga

SEQ ID NO: 4225 - RNA, 19 nt, Influenza A virus
gucugcagagacaacugga

SEQ ID NO: 4226 - RNA, 19 nt, Influenza A virus
gugucugcagagacaacug

SEQ ID NO: 4227 - RNA, 19 nt, Influenza A virus
ucauggccugauggggcgg

SEQ ID NO: 4228 - RNA, 19 nt, Influenza A virus
gaaaggcuccaauaggccc

SEQ ID NO: 4229 - RNA, 19 nt, Influenza A virus
cacacccagaaaaaacgac

SEQ ID NO: 4230 - RNA, 19 nt, Influenza A virus
augugucugcagagacaac

SEQ ID NO: 4231 - RNA, 19 nt, Influenza A virus
uuuccaguuaugugugcuc

SEQ ID NO: 4232 - RNA, 19 nt, Influenza A virus
gucaggaagugcucagcau

SEQ ID NO: 4233 - RNA, 19 nt, Influenza A virus
ggugucagaugugucugca

SEQ ID NO: 4234 - RNA, 19 nt, Influenza A virus
cuggugucagaugugucug

SEQ ID NO: 4235 - RNA, 19 nt, Influenza A virus
gugucagaugugucugcag

SEQ ID NO: 4236 - RNA, 19 nt, Influenza A virus
uggugucagaugugucugc

SEQ ID NO: 4237 - RNA, 19 nt, Influenza A virus
guuuccaguuaugugugcu

SEQ ID NO: 4238 - RNA, 19 nt, Influenza A virus
gcauuguuuccaguuaugu

SEQ ID NO: 4239 - RNA, 19 nt, Influenza A virus
agcauuguuuccaguuaug

SEQ ID NO: 4240 - RNA, 19 nt, Influenza A virus
guacauauggaacaggcuc

SEQ ID NO: 4241 - RNA, 19 nt, Influenza A virus
uguuuccaguuaugugugc

SEQ ID NO: 4242 - RNA, 19 nt, Influenza A virus
gucagaugugucugcagag

SEQ ID NO: 4243 - RNA, 19 nt, Influenza A virus
gguacauauggaacaggcu

SEQ ID NO: 4244 - RNA, 19 nt, Influenza A virus
ugucagaugugucugcaga

SEQ ID NO: 4245 - RNA, 19 nt, Influenza A virus
ccuggugucagaugugucu

SEQ ID NO: 4246 - RNA, 19 nt, Influenza A virus
cauauggaacaggcucaug

SEQ ID NO: 4247 - RNA, 19 nt, Influenza A virus
uacauauggaacaggcuca

SEQ ID NO: 4248 - RNA, 19 nt, Influenza A virus
cagguacauauggaacagg

SEQ ID NO: 4249 - RNA, 19 nt, Influenza A virus
acuggaaaggcuccaauag

SEQ ID NO: 4250 - RNA, 19 nt, Influenza A virus
auauggaacaggcucaugg

SEQ ID NO: 4251 - RNA, 19 nt, Influenza A virus
agguacauauggaacaggc

SEQ ID NO: 4252 - RNA, 19 nt, Influenza A virus
auagcauuguuuccaguua

SEQ ID NO: 4253 - RNA, 19 nt, Influenza A virus
uuguuuccaguuaugugug

SEQ ID NO: 4254 - RNA, 19 nt, Influenza A virus
uagcauuguuuccaguuau

SEQ ID NO: 4255 - RNA, 19 nt, Influenza A virus
ucagguacauauggaacag

SEQ ID NO: 4256 - RNA, 19 nt, Influenza A virus
aacuggaaaggcuccaaua

SEQ ID NO: 4257 - RNA, 19 nt, Influenza A virus
auuguuuccaguuaugugu

SEQ ID NO: 4258 - RNA, 19 nt, Influenza A virus
acauauggaacaggcucau

SEQ ID NO: 4259 - RNA, 19 nt, Influenza A virus
cauuguuuccaguuaugug

SEQ ID NO: 4260 - RNA, 19 nt, Influenza A virus
cuggaaaggcuccaauagg

SEQ ID NO: 4261 - RNA, 19 nt, Influenza A virus
gacaacuggaaaggcucca

SEQ ID NO: 4262 - RNA, 19 nt, Influenza A virus
uagaaagaaacauaacaga

SEQ ID NO: 4263 - RNA, 19 nt, Influenza A virus
acaacuggaaaggcuccaa

SEQ ID NO: 4264 - RNA, 19 nt, Influenza A virus
caacuggaaaggcuccaau

SEQ ID NO: 4265 - RNA, 19 nt, Influenza A virus
agaaagaaacauaacagag

SEQ ID NO: 4266 - RNA, 19 nt, Influenza A virus
aaagaaacauaacagagau

SEQ ID NO: 4267 - RNA, 19 nt, Influenza A virus
gaaagaaacauaacagaga

SEQ ID NO: 4268 - RNA, 19 nt, Influenza A virus
agacaacuggaaaggcucc

SEQ ID NO: 4269 - RNA, 19 nt, Influenza A virus
aaaggcuccaauaggccca

SEQ ID NO: 4270 - RNA, 19 nt, Influenza A virus
gaaacauaacagagauagu

SEQ ID NO: 4271 - RNA, 19 nt, Influenza A virus
agaaacauaacagagauag

SEQ ID NO: 4272 - RNA, 19 nt, Influenza A virus
aaggcuccaauaggcccau

SEQ ID NO: 4273 - RNA, 19 nt, Influenza A virus
aagaaacauaacagagaua

SEQ ID NO: 4274 - RNA, 19 nt, Influenza A virus
accucagguacauauggaa

SEQ ID NO: 4275 - RNA, 19 nt, Influenza A virus
ccucagguacauauggaac

SEQ ID NO: 4276 - RNA, 19 nt, Influenza A virus
cucagguacauauggaaca

SEQ ID NO: 4277 - RNA, 19 nt, Influenza A virus
uacuguaacauugcauuuc

SEQ ID NO: 4278 - RNA, 19 nt, Influenza A virus
uacaugauaggaccccuua

SEQ ID NO: 4279 - RNA, 19 nt, Influenza A virus
cauagcaugguccagcuca

SEQ ID NO: 4280 - RNA, 19 nt, Influenza A virus
augggaagaacgaucagcg

SEQ ID NO: 4281 - RNA, 19 nt, Influenza A virus
ugcauagcaugguccagcu

SEQ ID NO: 4282 - RNA, 19 nt, Influenza A virus
gcauagcaugguccagcuc

SEQ ID NO: 4283 - RNA, 19 nt, Influenza A virus
uugucaggaagugcucagc

SEQ ID NO: 4284 - RNA, 19 nt, Influenza A virus
ugggaagaacgaucagcga

SEQ ID NO: 4285 - RNA, 19 nt, Influenza A virus
auugucaggaagugcucag

SEQ ID NO: 4286 - RNA, 19 nt, Influenza A virus
cuuguuggagacacaccca

SEQ ID NO: 4287 - RNA, 19 nt, Influenza A virus
gugcauagcaugguccagc

SEQ ID NO: 4288 - RNA, 19 nt, Influenza A virus
gugugcauagcauggucca

SEQ ID NO: 4289 - RNA, 19 nt, Influenza A virus
uuguuggagacacacccag

SEQ ID NO: 4290 - RNA, 19 nt, Influenza A virus
ugugcauagcaugguccag

SEQ ID NO: 4291 - RNA, 19 nt, Influenza A virus
uguuggagacacacccaga

SEQ ID NO: 4292 - RNA, 19 nt, Influenza A virus
guuggagacacacccagaa

SEQ ID NO: 4293 - RNA, 19 nt, Influenza A virus
aagugugcauagcaugguc

SEQ ID NO: 4294 - RNA, 19 nt, Influenza A virus
agugugcauagcauggucc

SEQ ID NO: 4295 - RNA, 19 nt, Influenza A virus
uuggagacacacccagaaa

SEQ ID NO: 4296 - RNA, 19 nt, Influenza A virus
caagugugcauagcauggu

SEQ ID NO: 4297 - RNA, 19 nt, Influenza A virus
ggagacacacccagaaaaa

SEQ ID NO: 4298 - RNA, 19 nt, Influenza A virus
uggagacacacccagaaaa

SEQ ID NO: 4299 - RNA, 19 nt, Influenza A virus
aaacauaacagagauagug

SEQ ID NO: 4300 - RNA, 19 nt, Influenza A virus
agaauacagaaauugguca

SEQ ID NO: 4301 - RNA, 19 nt, Influenza A virus
uccgguuauucugguauuu

SEQ ID NO: 4302 - RNA, 19 nt, Influenza A virus
auuauagcauuguuuccag

SEQ ID NO: 4303 - RNA, 19 nt, Influenza A virus
uauagcauuguuuccaguu

SEQ ID NO: 4304 - RNA, 19 nt, Influenza A virus
gggaagaacgaucagcgag

SEQ ID NO: 4305 - RNA, 19 nt, Influenza A virus
ccgguuauucugguauuuu

SEQ ID NO: 4306 - RNA, 19 nt, Influenza A virus
uuauagcauuguuuccagu

SEQ ID NO: 4307 - RNA, 19 nt, Influenza A virus
caguacaugauaggacccc

SEQ ID NO: 4308 - RNA, 19 nt, Influenza A virus
ugcguuuguaucaauggaa

SEQ ID NO: 4309 - RNA, 19 nt, Influenza A virus
gauuauagcauuguuucca

SEQ ID NO: 4310 - RNA, 19 nt, Influenza A virus
ggcugcauguuuguguaac

SEQ ID NO: 4311 - RNA, 19 nt, Influenza A virus
caccucagguacauaugga

SEQ ID NO: 4312 - RNA, 19 nt, Influenza A virus
guacaugauaggaccccuu

SEQ ID NO: 4313 - RNA, 19 nt, Influenza A virus
uggcaccucagguacauau

SEQ ID NO: 4314 - RNA, 19 nt, Influenza A virus
cgguuauucugguauuuuc

SEQ ID NO: 4315 - RNA, 19 nt, Influenza A virus
gagacacacccagaaaaaa

SEQ ID NO: 4316 - RNA, 19 nt, Influenza A virus
ggcaccucagguacauaug

SEQ ID NO: 4317 - RNA, 19 nt, Influenza A virus
guggcaccucagguacaua

SEQ ID NO: 4318 - RNA, 19 nt, Influenza A virus
gcguuuguaucaauggaac

SEQ ID NO: 4319 - RNA, 19 nt, Influenza A virus
uuuguaucaauggaacuug

SEQ ID NO: 4320 - RNA, 19 nt, Influenza A virus
acaguacaugauaggaccc

SEQ ID NO: 4321 - RNA, 19 nt, Influenza A virus
gcaccucagguacauaugg

SEQ ID NO: 4322 - RNA, 19 nt, Influenza A virus
uguggcaccucagguacau

SEQ ID NO: 4323 - RNA, 19 nt, Influenza A virus
uggcugcauguuuguguaa

SEQ ID NO: 4324 - RNA, 19 nt, Influenza A virus
aguacaugauaggaccccu

SEQ ID NO: 4325 - RNA, 19 nt, Influenza A virus
guuuguaucaauggaacuu

SEQ ID NO: 4326 - RNA, 19 nt, Influenza A virus
augcguuuguaucaaugga

SEQ ID NO: 4327 - RNA, 19 nt, Influenza A virus
acacaguacaugauaggac

SEQ ID NO: 4328 - RNA, 19 nt, Influenza A virus
uuguaucaauggaacuugu

SEQ ID NO: 4329 - RNA, 19 nt, Influenza A virus
cguuuguaucaauggaacu

SEQ ID NO: 4330 - RNA, 19 nt, Influenza A virus
guccgguuauucugguauu

SEQ ID NO: 4331 - RNA, 19 nt, Influenza A virus
ucaaucggugcuuuuaugu

SEQ ID NO: 4332 - RNA, 19 nt, Influenza A virus
cacaguacaugauaggacc

SEQ ID NO: 4333 - RNA, 19 nt, Influenza A virus
agacacacccagaaaaaac

SEQ ID NO: 4334 - RNA, 19 nt, Influenza A virus
augugugcucaggacuugu

SEQ ID NO: 4335 - RNA, 19 nt, Influenza A virus
guuaugugugcucaggacu

SEQ ID NO: 4336 - RNA, 19 nt, Influenza A virus
cgauauccuggugucagau

SEQ ID NO: 4337 - RNA, 19 nt, Influenza A virus
uuaugugugcucaggacuu

SEQ ID NO: 4338 - RNA, 19 nt, Influenza A virus
auauccuggugucagaugu

SEQ ID NO: 4339 - RNA, 19 nt, Influenza A virus
uaugugugcucaggacuug

SEQ ID NO: 4340 - RNA, 19 nt, Influenza A virus
ugugcucaggacuuguugg

SEQ ID NO: 4341 - RNA, 19 nt, Influenza A virus
gauauccuggugucagaug

SEQ ID NO: 4342 - RNA, 19 nt, Influenza A virus
aaucggugcuuuuaugugg

SEQ ID NO: 4343 - RNA, 19 nt, Influenza A virus
ugugugcucaggacuuguu

SEQ ID NO: 4344 - RNA, 19 nt, Influenza A virus
cucgauauccuggugucag

SEQ ID NO: 4345 - RNA, 19 nt, Influenza A virus
aguuaugugugcucaggac

SEQ ID NO: 4346 - RNA, 19 nt, Influenza A virus
gugugcucaggacuuguug

SEQ ID NO: 4347 - RNA, 19 nt, Influenza A virus
aucggugcuuuuaugugga

SEQ ID NO: 4348 - RNA, 19 nt, Influenza A virus
gcaagugugcauagcaugg

SEQ ID NO: 4349 - RNA, 19 nt, Influenza A virus
uuuuguggcaccucaggua

SEQ ID NO: 4350 - RNA, 19 nt, Influenza A virus
ccucgauauccugguguca

SEQ ID NO: 4351 - RNA, 19 nt, Influenza A virus
aucaaucggugcuuuuaug

SEQ ID NO: 4352 - RNA, 19 nt, Influenza A virus
ucgauauccuggugucaga

SEQ ID NO: 4353 - RNA, 19 nt, Influenza A virus
guuuuguggcaccucaggu

SEQ ID NO: 4354 - RNA, 19 nt, Influenza A virus
uuuguggcaccucagguac

SEQ ID NO: 4355 - RNA, 19 nt, Influenza A virus
caaucggugcuuuuaugug

SEQ ID NO: 4356 - RNA, 19 nt, Influenza A virus
uuguggcaccucagguaca

SEQ ID NO: 4357 - RNA, 19 nt, Influenza A virus
caguuaugugugcucagga

SEQ ID NO: 4358 - RNA, 19 nt, Influenza A virus
acccagaaaaaacgacagc

SEQ ID NO: 4359 - RNA, 19 nt, Influenza A virus
cccagaaaaaacgacagcu

SEQ ID NO: 4360 - RNA, 19 nt, Influenza A virus
gcaucaaucggugcuuuua

SEQ ID NO: 4361 - RNA, 19 nt, Influenza A virus
uuguguuuuguggcaccuc

SEQ ID NO: 4362 - RNA, 19 nt, Influenza A virus
caucaaucggugcuuuuau

SEQ ID NO: 4363 - RNA, 19 nt, Influenza A virus
uccucgauauccugguguc

SEQ ID NO: 4364 - RNA, 19 nt, Influenza A virus
ugcaucaaucggugcuuuu

SEQ ID NO: 4365 - RNA, 19 nt, Influenza A virus
auccucgauauccuggugu

SEQ ID NO: 4366 - RNA, 19 nt, Influenza A virus
uauccucgauauccuggug

SEQ ID NO: 4367 - RNA, 19 nt, Influenza A virus
gcucaggacuuguuggaga

SEQ ID NO: 4368 - RNA, 19 nt, Influenza A virus
ugcucaggacuuguuggag

SEQ ID NO: 4369 - RNA, 19 nt, Influenza A virus
guuguguuuuguggcaccu

SEQ ID NO: 4370 - RNA, 19 nt, Influenza A virus
uguuguguuuuguggcacc

SEQ ID NO: 4371 - RNA, 19 nt, Influenza A virus
auuggcucuguuucucuca

SEQ ID NO: 4372 - RNA, 19 nt, Influenza A virus
uguguuuuguggcaccuca

SEQ ID NO: 4373 - RNA, 19 nt, Influenza A virus
ggacuuguuggagacacac

SEQ ID NO: 4374 - RNA, 19 nt, Influenza A virus
gacuuguuggagacacacc

SEQ ID NO: 4375 - RNA, 19 nt, Influenza A virus
caggacuuguuggagacac

SEQ ID NO: 4376 - RNA, 19 nt, Influenza A virus
cucaggacuuguuggagac

SEQ ID NO: 4377 - RNA, 19 nt, Influenza A virus
aggacuuguuggagacaca

SEQ ID NO: 4378 - RNA, 19 nt, Influenza A virus
guguuuuguggcaccucag

SEQ ID NO: 4379 - RNA, 19 nt, Influenza A virus
ucaggacuuguuggagaca

SEQ ID NO: 4380 - RNA, 19 nt, Influenza A virus
uguuuuguggcaccucagg

SEQ ID NO: 4381 - RNA, 19 nt, Influenza A virus
acuuguuggagacacaccc

SEQ ID NO: 4382 - RNA, 19 nt, Influenza A virus
ucaauggaacuuguacagu

SEQ ID NO: 4383 - RNA, 19 nt, Influenza A virus
aucaauggaacuuguacag

SEQ ID NO: 4384 - RNA, 19 nt, Influenza A virus
cugcaucaaucggugcuuu

SEQ ID NO: 4385 - RNA, 19 nt, Influenza A virus
gugcucaggacuuguugga

SEQ ID NO: 4386 - RNA, 19 nt, Influenza A virus
guuaucaauuugcccuugg

SEQ ID NO: 4387 - RNA, 19 nt, Influenza A virus
aagcugcaucaaucggugc

SEQ ID NO: 4388 - RNA, 19 nt, Influenza A virus
gcugcaucaaucggugcuu

SEQ ID NO: 4389 - RNA, 19 nt, Influenza A virus
uguuaucaauuugcccuug

SEQ ID NO: 4390 - RNA, 19 nt, Influenza A virus
aaaagcugcaucaaucggu

SEQ ID NO: 4391 - RNA, 19 nt, Influenza A virus
aaagcugcaucaaucggug

SEQ ID NO: 4392 - RNA, 19 nt, Influenza A virus
agcugcaucaaucggugcu

SEQ ID NO: 4393 - RNA, 19 nt, Influenza A virus
uuggcucuguuucucucac

SEQ ID NO: 4394 - RNA, 19 nt, Influenza A virus
gguccgguuauucugguau

SEQ ID NO: 4395 - RNA, 19 nt, Influenza A virus
agguccgguuauucuggua

SEQ ID NO: 4396 - RNA, 19 nt, Influenza A virus
caaaagcugcaucaaucgg

SEQ ID NO: 4397 - RNA, 19 nt, Influenza A virus
auggcugcauguuugugua

SEQ ID NO: 4398 - RNA, 19 nt, Influenza A virus
uaucaauggaacuuguaca

SEQ ID NO: 4399 - RNA, 19 nt, Influenza A virus
guaucaauggaacuuguac

SEQ ID NO: 4400 - RNA, 19 nt, Influenza A virus
uguaucaauggaacuugua

SEQ ID NO: 4401 - RNA, 19 nt, Influenza A virus
aauagaaagaaacauaaca

SEQ ID NO: 4402 - RNA, 19 nt, Influenza A virus
ucauggagugaaaggcugg

SEQ ID NO: 4403 - RNA, 19 nt, Influenza A virus
cauggagugaaaggcuggg

SEQ ID NO: 4404 - RNA, 19 nt, Influenza A virus
caagagaaccuuauguguc

SEQ ID NO: 4405 - RNA, 19 nt, Influenza A virus
auggagugaaaggcugggc

SEQ ID NO: 4406 - RNA, 19 nt, Influenza A virus
auagaaagaaacauaacag

SEQ ID NO: 4407 - RNA, 19 nt, Influenza A virus
acaagagaaccuuaugugu

SEQ ID NO: 4408 - RNA, 19 nt, Influenza A virus
uggagugaaaggcugggcc

SEQ ID NO: 4409 - RNA, 19 nt, Influenza A virus
ucaaaugacacaguacaug

SEQ ID NO: 4410 - RNA, 19 nt, Influenza A virus
gcaaaagcugcaucaaucg

SEQ ID NO: 4411 - RNA, 19 nt, Influenza A virus
aagagaaccuuauguguca

SEQ ID NO: 4412 - RNA, 19 nt, Influenza A virus
augacacaguacaugauag

SEQ ID NO: 4413 - RNA, 19 nt, Influenza A virus
aaugacacaguacaugaua

SEQ ID NO: 4414 - RNA, 19 nt, Influenza A virus
uuugaugauggaaaugacg

SEQ ID NO: 4415 - RNA, 19 nt, Influenza A virus
uaauagaaagaaacauaac

SEQ ID NO: 4416 - RNA, 19 nt, Influenza A virus
agggaacaacacuaaacaa

SEQ ID NO: 4417 - RNA, 19 nt, Influenza A virus
uauccuggugucagaugug

SEQ ID NO: 4418 - RNA, 19 nt, Influenza A virus
auccuggugucagaugugu

SEQ ID NO: 4419 - RNA, 19 nt, Influenza A virus
ucggugcuuuuauguggag

SEQ ID NO: 4420 - RNA, 19 nt, Influenza A virus
cagggaacaacacuaaaca

SEQ ID NO: 4421 - RNA, 19 nt, Influenza A virus
gacacaguacaugauagga

SEQ ID NO: 4422 - RNA, 19 nt, Influenza A virus
uugaugauggaaaugacgu

SEQ ID NO: 4423 - RNA, 19 nt, Influenza A virus
gggaacaacacuaaacaac

SEQ ID NO: 4424 - RNA, 19 nt, Influenza A virus
ggcaaaagcugcaucaauc

SEQ ID NO: 4425 - RNA, 19 nt, Influenza A virus
caaaugacacaguacauga

SEQ ID NO: 4426 - RNA, 19 nt, Influenza A virus
uccuggugucagauguguc

SEQ ID NO: 4427 - RNA, 19 nt, Influenza A virus
uucacgcucaccgugccca

SEQ ID NO: 4428 - RNA, 19 nt, Influenza A virus
caggcccccucaaagccga

SEQ ID NO: 4429 - RNA, 19 nt, Influenza A virus
ucaggcccccucaaagccg

SEQ ID NO: 4430 - RNA, 19 nt, Influenza A virus
ucacgcucaccgugcccag

SEQ ID NO: 4431 - RNA, 19 nt, Influenza A virus
cacgcucaccgugcccagu

SEQ ID NO: 4432 - RNA, 19 nt, Influenza A virus
cgcucaccgugcccaguga

SEQ ID NO: 4433 - RNA, 19 nt, Influenza A virus
acgcucaccgugcccagug

SEQ ID NO: 4434 - RNA, 19 nt, Influenza A virus
ucaccgugcccagugagcg

SEQ ID NO: 4435 - RNA, 19 nt, Influenza A virus
cucaccgugcccagugagc

SEQ ID NO: 4436 - RNA, 19 nt, Influenza A virus
gcucaccgugcccagugag

SEQ ID NO: 4437 - RNA, 19 nt, Influenza A virus
aucuugaggcucucaugga

SEQ ID NO: 4438 - RNA, 19 nt, Influenza A virus
gaucuugaggcucucaugg

SEQ ID NO: 4439 - RNA, 19 nt, Influenza A virus
ugucaccucugacuaaggg

SEQ ID NO: 4440 - RNA, 19 nt, Influenza A virus
cugucaccucugacuaagg

SEQ ID NO: 4441 - RNA, 19 nt, Influenza A virus
gacugcagcguagacgcuu

SEQ ID NO: 4442 - RNA, 19 nt, Influenza A virus
ggacugcagcguagacgcu

SEQ ID NO: 4443 - RNA, 19 nt, Influenza A virus
ugcagcguagacgcuuugu

SEQ ID NO: 4444 - RNA, 19 nt, Influenza A virus
acugcagcguagacgcuuu

SEQ ID NO: 4445 - RNA, 19 nt, Influenza A virus
cugcagcguagacgcuuug

SEQ ID NO: 4446 - RNA, 19 nt, Influenza A virus
gcuauggagcaaauggcug

SEQ ID NO: 4447 - RNA, 19 nt, Influenza A virus
uggcuaaagacaagaccaa

SEQ ID NO: 4448 - RNA, 19 nt, Influenza A virus
cagcguagacgcuuugucc

SEQ ID NO: 4449 - RNA, 19 nt, Influenza A virus
cuauggagcaaauggcugg

SEQ ID NO: 4450 - RNA, 19 nt, Influenza A virus
agcguagacgcuuugucca

SEQ ID NO: 4451 - RNA, 19 nt, Influenza A virus
gcagcguagacgcuuuguc

SEQ ID NO: 4452 - RNA, 19 nt, Influenza A virus
ggcuaaagacaagaccaau

SEQ ID NO: 4453 - RNA, 19 nt, Influenza A virus
cguagacgcuuuguccaaa

SEQ ID NO: 4454 - RNA, 19 nt, Influenza A virus
guagacgcuuuguccaaaa

SEQ ID NO: 4455 - RNA, 19 nt, Influenza A virus
agacgcuuuguccaaaaug

SEQ ID NO: 4456 - RNA, 19 nt, Influenza A virus
uagacgcuuuguccaaaau

SEQ ID NO: 4457 - RNA, 19 nt, Influenza A virus
gacgcuuuguccaaaaugc

SEQ ID NO: 4458 - RNA, 19 nt, Influenza A virus
acgcuuuguccaaaaugcc

SEQ ID NO: 4459 - RNA, 19 nt, Influenza A virus
gcuuuguccaaaaugcccu

SEQ ID NO: 4460 - RNA, 19 nt, Influenza A virus
cgcuuuguccaaaaugccc

SEQ ID NO: 4461 - RNA, 19 nt, Influenza A virus
ucaguuauucugcuggugc

SEQ ID NO: 4462 - RNA, 19 nt, Influenza A virus
auucugcuggugcacuugc

SEQ ID NO: 4463 - RNA, 19 nt, Influenza A virus
cucauggaauggcuaaaga

SEQ ID NO: 4464 - RNA, 19 nt, Influenza A virus
ucauggaauggcuaaagac

SEQ ID NO: 4465 - RNA, 19 nt, Influenza A virus
uauucugcuggugcacuug

SEQ ID NO: 4466 - RNA, 19 nt, Influenza A virus
auggaauggcuaaagacaa

SEQ ID NO: 4467 - RNA, 19 nt, Influenza A virus
cucaguuauucugcuggug

SEQ ID NO: 4468 - RNA, 19 nt, Influenza A virus
guuauucugcuggugcacu

SEQ ID NO: 4469 - RNA, 19 nt, Influenza A virus
uggccagcacuacagcuaa

SEQ ID NO: 4470 - RNA, 19 nt, Influenza A virus
uuauucugcuggugcacuu

SEQ ID NO: 4471 - RNA, 19 nt, Influenza A virus
cauggaauggcuaaagaca

SEQ ID NO: 4472 - RNA, 19 nt, Influenza A virus
uggaauggcuaaagacaag

SEQ ID NO: 4473 - RNA, 19 nt, Influenza A virus
ucucauggaauggcuaaag

SEQ ID NO: 4474 - RNA, 19 nt, Influenza A virus
aguuauucugcuggugcac

SEQ ID NO: 4475 - RNA, 19 nt, Influenza A virus
ggaauggcuaaagacaaga

SEQ ID NO: 4476 - RNA, 19 nt, Influenza A virus
aauggcuaaagacaagacc

SEQ ID NO: 4477 - RNA, 19 nt, Influenza A virus
gaauggcuaaagacaagac

SEQ ID NO: 4478 - RNA, 19 nt, Influenza A virus
uccauggggccaaagaaau

SEQ ID NO: 4479 - RNA, 19 nt, Influenza A virus
gcguagacgcuuuguccaa

SEQ ID NO: 4480 - RNA, 19 nt, Influenza A virus
caguuauucugcuggugca

SEQ ID NO: 4481 - RNA, 19 nt, Influenza A virus
uuccauggggccaaagaaa

SEQ ID NO: 4482 - RNA, 19 nt, Influenza A virus
caccucugacuaaggggau

SEQ ID NO: 4483 - RNA, 19 nt, Influenza A virus
gucaccucugacuaagggg

SEQ ID NO: 4484 - RNA, 19 nt, Influenza A virus
ucaccucugacuaagggga

SEQ ID NO: 4485 - RNA, 19 nt, Influenza A virus
cuggugcacuugccaguug

SEQ ID NO: 4486 - RNA, 19 nt, Influenza A virus
gaggcucucauggaauggc

SEQ ID NO: 4487 - RNA, 19 nt, Influenza A virus
gcucucauggaauggcuaa

SEQ ID NO: 4488 - RNA, 19 nt, Influenza A virus
cucucauggaauggcuaaa

SEQ ID NO: 4489 - RNA, 19 nt, Influenza A virus
auggggccaaagaaauagc

SEQ ID NO: 4490 - RNA, 19 nt, Influenza A virus
aggcucucauggaauggcu

SEQ ID NO: 4491 - RNA, 19 nt, Influenza A virus
ggcucucauggaauggcua

SEQ ID NO: 4492 - RNA, 19 nt, Influenza A virus
uugaggcucucauggaaug

SEQ ID NO: 4493 - RNA, 19 nt, Influenza A virus
ugaggcucucauggaaugg

SEQ ID NO: 4494 - RNA, 19 nt, Influenza A virus
cuugaggcucucauggaau

SEQ ID NO: 4495 - RNA, 19 nt, Influenza A virus
cauggggccaaagaaauag

SEQ ID NO: 4496 - RNA, 19 nt, Influenza A virus
gcuggugcacuugccaguu

SEQ ID NO: 4497 - RNA, 19 nt, Influenza A virus
cuucuacggaaggaguacc

SEQ ID NO: 4498 - RNA, 19 nt, Influenza A virus
ucuugaggcucucauggaa

SEQ ID NO: 4499 - RNA, 19 nt, Influenza A virus
cugcuggugcacuugccag

SEQ ID NO: 4500 - RNA, 19 nt, Influenza A virus
ugcuggugcacuugccagu

SEQ ID NO: 4501 - RNA, 19 nt, Influenza A virus
ucugcuggugcacuugcca

SEQ ID NO: 4502 - RNA, 19 nt, Influenza A virus
ccauggggccaaagaaaua

SEQ ID NO: 4503 - RNA, 19 nt, Influenza A virus
agucuaugagggaagaaua

SEQ ID NO: 4504 - RNA, 19 nt, Influenza A virus
ccuucuacggaaggaguac

SEQ ID NO: 4505 - RNA, 19 nt, Influenza A virus
gucuaugagggaagaauau

SEQ ID NO: 4506 - RNA, 19 nt, Influenza A virus
cuaugagggaagaauaucg

SEQ ID NO: 4507 - RNA, 19 nt, Influenza A virus
ucuaugagggaagaauauc

SEQ ID NO: 4508 - RNA, 19 nt, Influenza A virus
gucauuuugucagcauaga

SEQ ID NO: 4509 - RNA, 19 nt, Influenza A virus
gagucuaugagggaagaau

SEQ ID NO: 4510 - RNA, 19 nt, Influenza A virus
ucauuuugucagcauagag

SEQ ID NO: 4511 - RNA, 19 nt, Influenza A virus
agacuugaagaugucuuug

SEQ ID NO: 4512 - RNA, 19 nt, Influenza A virus
gacuugaagaugucuuugc

SEQ ID NO: 4513 - RNA, 19 nt, Influenza A virus
agagacuugaagaugucuu

SEQ ID NO: 4514 - RNA, 19 nt, Influenza A virus
gagacuugaagaugucuuu

SEQ ID NO: 4515 - RNA, 19 nt, Influenza A virus
cagagacuugaagaugucu

SEQ ID NO: 4516 - RNA, 19 nt, Influenza A virus
gugcagaugcaacgauuca

SEQ ID NO: 4517 - RNA, 19 nt, Influenza A virus
uucugcuggugcacuugcc

SEQ ID NO: 4518 - RNA, 19 nt, Influenza A virus
ugcagaugcaacgauucaa

SEQ ID NO: 4519 - RNA, 19 nt, Influenza A virus
uaugagggaagaauaucga

SEQ ID NO: 4520 - RNA, 19 nt, Influenza A virus
augggggugcagaugcaac

SEQ ID NO: 4521 - RNA, 19 nt, Influenza A virus
ugggggugcagaugcaacg

SEQ ID NO: 4522 - RNA, 19 nt, Influenza A virus
accucugacuaaggggauu

SEQ ID NO: 4523 - RNA, 19 nt, Influenza A virus
uggauucuugaucgucuuu

SEQ ID NO: 4524 - RNA, 19 nt, Influenza A virus
ggauucuugaucgucuuuu

SEQ ID NO: 4525 - RNA, 19 nt, Influenza A virus
ggggugcagaugcaacgau

SEQ ID NO: 4526 - RNA, 19 nt, Influenza A virus
gggugcagaugcaacgauu

SEQ ID NO: 4527 - RNA, 19 nt, Influenza A virus
guggauucuugaucgucuu

SEQ ID NO: 4528 - RNA, 19 nt, Influenza A virus
ggugcagaugcaacgauuc

SEQ ID NO: 4529 - RNA, 19 nt, Influenza A virus
gggggugcagaugcaacga

SEQ ID NO: 4530 - RNA, 19 nt, Influenza A virus
cucugacuaaggggauuuu

SEQ ID NO: 4531 - RNA, 19 nt, Influenza A virus
ccucugacuaaggggauuu

SEQ ID NO: 4532 - RNA, 19 nt, Influenza A virus
uguggauucuugaucgucu

SEQ ID NO: 4533 - RNA, 19 nt, Influenza A virus
ucuucuugaaaauuugcag

SEQ ID NO: 4534 - RNA, 19 nt, Influenza A virus
auggcuaaagacaagacca

SEQ ID NO: 4535 - RNA, 19 nt, Influenza A virus
aucuucuugaaaauuugca

SEQ ID NO: 4536 - RNA, 19 nt, Influenza A virus
gaaugggggugcagaugca

SEQ ID NO: 4537 - RNA, 19 nt, Influenza A virus
cgaaugggggugcagaugc

SEQ ID NO: 4538 - RNA, 19 nt, Influenza A virus
aaugggggugcagaugcaa

SEQ ID NO: 4539 - RNA, 19 nt, Influenza A virus
uugaagaugucuuugcugg

SEQ ID NO: 4540 - RNA, 19 nt, Influenza A virus
cuugaagaugucuuugcug

SEQ ID NO: 4541 - RNA, 19 nt, Influenza A virus
acuugaagaugucuuugcu

SEQ ID NO: 4542 - RNA, 19 nt, Influenza A virus
gauccaaauaacauggaca

SEQ ID NO: 4543 - RNA, 19 nt, Influenza A virus
augaucuucuugaaaauuu

SEQ ID NO: 4544 - RNA, 19 nt, Influenza A virus
agauugcugacucccagca

SEQ ID NO: 4545 - RNA, 19 nt, Influenza A virus
cagauugcugacucccagc

SEQ ID NO: 4546 - RNA, 19 nt, Influenza A virus
gaucuucuugaaaauuugc

SEQ ID NO: 4547 - RNA, 19 nt, Influenza A virus
ugaucuucuugaaaauuug

SEQ ID NO: 4548 - RNA, 19 nt, Influenza A virus
cagaaacgaaugggggugc

SEQ ID NO: 4549 - RNA, 19 nt, Influenza A virus
acgaaugggggugcagaug

SEQ ID NO: 4550 - RNA, 19 nt, Influenza A virus
agaaacgaaugggggugca

SEQ ID NO: 4551 - RNA, 19 nt, Influenza A virus
aaacgaaugggggugcaga

SEQ ID NO: 4552 - RNA, 19 nt, Influenza A virus
aacgaaugggggugcagau

SEQ ID NO: 4553 - RNA, 19 nt, Influenza A virus
uggagcaaauggcuggauc

SEQ ID NO: 4554 - RNA, 19 nt, Influenza A virus
auggagcaaauggcuggau

SEQ ID NO: 4555 - RNA, 19 nt, Influenza A virus
gaaacgaaugggggugcag

SEQ ID NO: 4556 - RNA, 19 nt, Influenza A virus
aucgucuuuuuuucaaaug

SEQ ID NO: 4557 - RNA, 19 nt, Influenza A virus
ccuaucagaaacgaauggg

SEQ ID NO: 4558 - RNA, 19 nt, Influenza A virus
uauggagcaaauggcugga

SEQ ID NO: 4559 - RNA, 19 nt, Influenza A virus
gaucgucuuuuuuucaaau

SEQ ID NO: 4560 - RNA, 19 nt, Influenza A virus
ugaucgucuuuuuuucaaa

SEQ ID NO: 4561 - RNA, 19 nt, Influenza A virus
uugaucgucuuuuuuucaa

SEQ ID NO: 4562 - RNA, 19 nt, Influenza A virus
ucgucuuuuuuucaaaugc

SEQ ID NO: 4563 - RNA, 19 nt, Influenza A virus
gauucuugaucgucuuuuu

SEQ ID NO: 4564 - RNA, 19 nt, Influenza A virus
auucuugaucgucuuuuuu

SEQ ID NO: 4565 - RNA, 19 nt, Influenza A virus
cuugaucgucuuuuuuuca

SEQ ID NO: 4566 - RNA, 19 nt, Influenza A virus
uugggacucauccuagcuc

SEQ ID NO: 4567 - RNA, 19 nt, Influenza A virus
auugggaucuugcacuuga

SEQ ID NO: 4568 - RNA, 19 nt, Influenza A virus
ucuugaucgucuuuuuuuc

SEQ ID NO: 4569 - RNA, 19 nt, Influenza A virus
uucuugaucgucuuuuuuu

SEQ ID NO: 4570 - RNA, 19 nt, Influenza A virus
gaugaucuucuugaaaauu

SEQ ID NO: 4571 - RNA, 19 nt, Influenza A virus
uaucgaaaggaacagcaga

SEQ ID NO: 4572 - RNA, 19 nt, Influenza A virus
agaugaucuucuugaaaau

SEQ ID NO: 4573 - RNA, 19 nt, Influenza A virus
uugggaucuugcacuugau

SEQ ID NO: 4574 - RNA, 19 nt, Influenza A virus
ugggaucuugcacuugaua

SEQ ID NO: 4575 - RNA, 19 nt, Influenza A virus
ucauugggaucuugcacuu

SEQ ID NO: 4576 - RNA, 19 nt, Influenza A virus
cauugggaucuugcacuug

SEQ ID NO: 4577 - RNA, 19 nt, Influenza A virus
cagaucuugaggcucucau

SEQ ID NO: 4578 - RNA, 19 nt, Influenza A virus
cacagaucuugaggcucuc

SEQ ID NO: 4579 - RNA, 19 nt, Influenza A virus
ccugagucuaugagggaag

SEQ ID NO: 4580 - RNA, 19 nt, Influenza A virus
acagaucuugaggcucuca

SEQ ID NO: 4581 - RNA, 19 nt, Influenza A virus
aucauugggaucuugcacu

SEQ ID NO: 4582 - RNA, 19 nt, Influenza A virus
cugagucuaugagggaaga

SEQ ID NO: 4583 - RNA, 19 nt, Influenza A virus
agaucuugaggcucucaug

SEQ ID NO: 4584 - RNA, 19 nt, Influenza A virus
acacagaucuugaggcucu

SEQ ID NO: 4585 - RNA, 19 nt, Influenza A virus
acagcuaaggcuauggagc

SEQ ID NO: 4586 - RNA, 19 nt, Influenza A virus
cagcuaaggcuauggagca

SEQ ID NO: 4587 - RNA, 19 nt, Influenza A virus
aacacagaucuugaggcuc

SEQ ID NO: 4588 - RNA, 19 nt, Influenza A virus
ggcuauggagcaaauggcu

SEQ ID NO: 4589 - RNA, 19 nt, Influenza A virus
acuacagcuaaggcuaugg

SEQ ID NO: 4590 - RNA, 19 nt, Influenza A virus
aaggcuauggagcaaaugg

SEQ ID NO: 4591 - RNA, 19 nt, Influenza A virus
aggcuauggagcaaauggc

SEQ ID NO: 4592 - RNA, 19 nt, Influenza A virus
cuacagcuaaggcuaugga

SEQ ID NO: 4593 - RNA, 19 nt, Influenza A virus
ccagcacuacagcuaaggc

SEQ ID NO: 4594 - RNA, 19 nt, Influenza A virus
agcacuacagcuaaggcua

SEQ ID NO: 4595 - RNA, 19 nt, Influenza A virus
cacuacagcuaaggcuaug

SEQ ID NO: 4596 - RNA, 19 nt, Influenza A virus
gccagcacuacagcuaagg

SEQ ID NO: 4597 - RNA, 19 nt, Influenza A virus
gcacuacagcuaaggcuau

SEQ ID NO: 4598 - RNA, 19 nt, Influenza A virus
cuaaggcuauggagcaaau

SEQ ID NO: 4599 - RNA, 19 nt, Influenza A virus
aauaucgaaaggaacagca

SEQ ID NO: 4600 - RNA, 19 nt, Influenza A virus
uaaggcuauggagcaaaug

SEQ ID NO: 4601 - RNA, 19 nt, Influenza A virus
gcuaaggcuauggagcaaa

SEQ ID NO: 4602 - RNA, 19 nt, Influenza A virus
gugaacagauugcugacuc

SEQ ID NO: 4603 - RNA, 19 nt, Influenza A virus
uacagcuaaggcuauggag

SEQ ID NO: 4604 - RNA, 19 nt, Influenza A virus
ugugaacagauugcugacu

SEQ ID NO: 4605 - RNA, 19 nt, Influenza A virus
cagcacuacagcuaaggcu

SEQ ID NO: 4606 - RNA, 19 nt, Influenza A virus
gaauaucgaaaggaacagc

SEQ ID NO: 4607 - RNA, 19 nt, Influenza A virus
acagauugcugacucccag

SEQ ID NO: 4608 - RNA, 19 nt, Influenza A virus
ugaacagauugcugacucc

SEQ ID NO: 4609 - RNA, 19 nt, Influenza A virus
gaacagauugcugacuccc

SEQ ID NO: 4610 - RNA, 19 nt, Influenza A virus
aacagauugcugacuccca

SEQ ID NO: 4611 - RNA, 19 nt, Influenza A virus
uaucauugggaucuugcac

SEQ ID NO: 4612 - RNA, 19 nt, Influenza A virus
acaugagaacagaaugguu

SEQ ID NO: 4613 - RNA, 19 nt, Influenza A virus
uaccugagucuaugaggga

SEQ ID NO: 4614 - RNA, 19 nt, Influenza A virus
auaucgaaaggaacagcag

SEQ ID NO: 4615 - RNA, 19 nt, Influenza A virus
augagggaagaauaucgaa

SEQ ID NO: 4616 - RNA, 19 nt, Influenza A virus
uugcuagucaggccaggca

SEQ ID NO: 4617 - RNA, 19 nt, Influenza A virus
ugagggaagaauaucgaaa

SEQ ID NO: 4618 - RNA, 19 nt, Influenza A virus
gggaagaauaucgaaagga

SEQ ID NO: 4619 - RNA, 19 nt, Influenza A virus
ggaagaauaucgaaaggaa

SEQ ID NO: 4620 - RNA, 19 nt, Influenza A virus
agggaagaauaucgaaagg

SEQ ID NO: 4621 - RNA, 19 nt, Influenza A virus
aagaauaucgaaaggaaca

SEQ ID NO: 4622 - RNA, 19 nt, Influenza A virus
guaccugagucuaugaggg

SEQ ID NO: 4623 - RNA, 19 nt, Influenza A virus
gaagaauaucgaaaggaac

SEQ ID NO: 4624 - RNA, 19 nt, Influenza A virus
uguucacgcucaccgugcc

SEQ ID NO: 4625 - RNA, 19 nt, Influenza A virus
agaauaucgaaaggaacag

SEQ ID NO: 4626 - RNA, 19 nt, Influenza A virus
guguucacgcucaccgugc

SEQ ID NO: 4627 - RNA, 19 nt, Influenza A virus
gagggaagaauaucgaaag

SEQ ID NO: 4628 - RNA, 19 nt, Influenza A virus
guucacgcucaccgugccc

SEQ ID NO: 4629 - RNA, 19 nt, Influenza A virus
ggccagcacuacagcuaag

SEQ ID NO: 4630 - RNA, 19 nt, Influenza A virus
uguguucacgcucaccgug

SEQ ID NO: 4631 - RNA, 19 nt, Influenza A virus
uuguguucacgcucaccgu

SEQ ID NO: 4632 - RNA, 19 nt, Influenza A virus
uuuguguucacgcucaccg

SEQ ID NO: 4633 - RNA, 19 nt, Influenza A virus
uuguccaaaaugcccucaa

SEQ ID NO: 4634 - RNA, 19 nt, Influenza A virus
accugagucuaugagggaa

SEQ ID NO: 4635 - RNA, 19 nt, Influenza A virus
uuuguccaaaaugcccuca

SEQ ID NO: 4636 - RNA, 19 nt, Influenza A virus
aaugcccucaaugggaaug

SEQ ID NO: 4637 - RNA, 19 nt, Influenza A virus
agcuaaggcuauggagcaa

SEQ ID NO: 4638 - RNA, 19 nt, Influenza A virus
augcccucaaugggaaugg

SEQ ID NO: 4639 - RNA, 19 nt, Influenza A virus
aguugcaugggccucauau

SEQ ID NO: 4640 - RNA, 19 nt, Influenza A virus
gcaugggccucauauacaa

SEQ ID NO: 4641 - RNA, 19 nt, Influenza A virus
ugcaugggccucauauaca

SEQ ID NO: 4642 - RNA, 19 nt, Influenza A virus
guugcaugggccucauaua

SEQ ID NO: 4643 - RNA, 19 nt, Influenza A virus
cuuuguccaaaaugcccuc

SEQ ID NO: 4644 - RNA, 19 nt, Influenza A virus
uugcaugggccucauauac

SEQ ID NO: 4645 - RNA, 19 nt, Influenza A virus
uccaaaaugcccucaaugg

SEQ ID NO: 4646 - RNA, 19 nt, Influenza A virus
guccaaaaugcccucaaug

SEQ ID NO: 4647 - RNA, 19 nt, Influenza A virus
uguccaaaaugcccucaau

SEQ ID NO: 4648 - RNA, 19 nt, Influenza A virus
agucauuuugucagcauag

SEQ ID NO: 4649 - RNA, 19 nt, Influenza A virus
aaaugcccucaaugggaau

SEQ ID NO: 4650 - RNA, 19 nt, Influenza A virus
aaaaugcccucaaugggaa

SEQ ID NO: 4651 - RNA, 19 nt, Influenza A virus
uuggccugguaugugcaac

SEQ ID NO: 4652 - RNA, 19 nt, Influenza A virus
caaaaugcccucaauggga

SEQ ID NO: 4653 - RNA, 19 nt, Influenza A virus
aucagaaacgaaugggggu

SEQ ID NO: 4654 - RNA, 19 nt, Influenza A virus
ucagaaacgaaugggggug

SEQ ID NO: 4655 - RNA, 19 nt, Influenza A virus
cuaucagaaacgaaugggg

SEQ ID NO: 4656 - RNA, 19 nt, Influenza A virus
ccaaaaugcccucaauggg

SEQ ID NO: 4657 - RNA, 19 nt, Influenza A virus
uaucagaaacgaauggggg

SEQ ID NO: 4658 - RNA, 19 nt, Influenza A virus
acggaaggaguaccugagu

SEQ ID NO: 4659 - RNA, 19 nt, Influenza A virus
uuuggccugguaugugcaa

SEQ ID NO: 4660 - RNA, 19 nt, Influenza A virus
uacggaaggaguaccugag

SEQ ID NO: 4661 - RNA, 19 nt, Influenza A virus
cggaaggaguaccugaguc

SEQ ID NO: 4662 - RNA, 19 nt, Influenza A virus
ucuacggaaggaguaccug

SEQ ID NO: 4663 - RNA, 19 nt, Influenza A virus
cacuugccaguugcauggg

SEQ ID NO: 4664 - RNA, 19 nt, Influenza A virus
gcacuugccaguugcaugg

SEQ ID NO: 4665 - RNA, 19 nt, Influenza A virus
cuacggaaggaguaccuga

SEQ ID NO: 4666 - RNA, 19 nt, Influenza A virus
uucuacggaaggaguaccu

SEQ ID NO: 4667 - RNA, 19 nt, Influenza A virus
ggaaggaguaccugagucu

SEQ ID NO: 4668 - RNA, 19 nt, Influenza A virus
ggugcacuugccaguugca

SEQ ID NO: 4669 - RNA, 19 nt, Influenza A virus
gugcacuugccaguugcau

SEQ ID NO: 4670 - RNA, 19 nt, Influenza A virus
ugcacuugccaguugcaug

SEQ ID NO: 4671 - RNA, 19 nt, Influenza A virus
aguaccugagucuaugagg

SEQ ID NO: 4672 - RNA, 19 nt, Influenza A virus
ggaguaccugagucuauga

SEQ ID NO: 4673 - RNA, 19 nt, Influenza A virus
gaguaccugagucuaugag

SEQ ID NO: 4674 - RNA, 19 nt, Influenza A virus
cagcagaaugcuguggaug

SEQ ID NO: 4675 - RNA, 19 nt, Influenza A virus
aggaguaccugagucuaug

SEQ ID NO: 4676 - RNA, 19 nt, Influenza A virus
gaaggaguaccugagucua

SEQ ID NO: 4677 - RNA, 19 nt, Influenza A virus
acagcagaaugcuguggau

SEQ ID NO: 4678 - RNA, 19 nt, Influenza A virus
ggaacagcagaaugcugug

SEQ ID NO: 4679 - RNA, 19 nt, Influenza A virus
gaacagcagaaugcugugg

SEQ ID NO: 4680 - RNA, 19 nt, Influenza A virus
aacagcagaaugcugugga

SEQ ID NO: 4681 - RNA, 19 nt, Influenza A virus
aaggaguaccugagucuau

SEQ ID NO: 4682 - RNA, 19 nt, Influenza A virus
cuugccaguugcaugggcc

SEQ ID NO: 4683 - RNA, 19 nt, Influenza A virus
uugccaguugcaugggccu

SEQ ID NO: 4684 - RNA, 19 nt, Influenza A virus
aggaacagcagaaugcugu

SEQ ID NO: 4685 - RNA, 19 nt, Influenza A virus
ugccaguugcaugggccuc

SEQ ID NO: 4686 - RNA, 19 nt, Influenza A virus
gccaguugcaugggccuca

SEQ ID NO: 4687 - RNA, 19 nt, Influenza A virus
ccaguugcaugggccucau

SEQ ID NO: 4688 - RNA, 19 nt, Influenza A virus
caguugcaugggccucaua

SEQ ID NO: 4689 - RNA, 19 nt, Influenza A virus
ugagucuaugagggaagaa

SEQ ID NO: 4690 - RNA, 19 nt, Influenza A virus
acuugccaguugcaugggc

SEQ ID NO: 4691 - RNA, 19 nt, Influenza A virus
uggugcacuugccaguugc

SEQ ID NO: 4692 - RNA, 19 nt, Influenza A virus
aagaugucuuugcugggaa

SEQ ID NO: 4693 - RNA, 19 nt, Influenza A virus
ugaagaugucuuugcuggg

SEQ ID NO: 4694 - RNA, 19 nt, Influenza A virus
gaagaugucuuugcuggga

SEQ ID NO: 4695 - RNA, 19 nt, Influenza A virus
guaucauugggaucuugca

SEQ ID NO: 4696 - RNA, 19 nt, Influenza A virus
aguaucauugggaucuugc

SEQ ID NO: 4697 - RNA, 19 nt, Influenza A virus
aaauggugcaggcaaugag

SEQ ID NO: 4698 - RNA, 19 nt, Influenza A virus
gcagaaugcuguggaugcu

SEQ ID NO: 4699 - RNA, 19 nt, Influenza A virus
ggacucauccuagcuccag

SEQ ID NO: 4700 - RNA, 19 nt, Influenza A virus
agaaugcuguggaugcuga

SEQ ID NO: 4701 - RNA, 19 nt, Influenza A virus
agcagaaugcuguggaugc

SEQ ID NO: 4702 - RNA, 19 nt, Influenza A virus
gaaugcuguggaugcugac

SEQ ID NO: 4703 - RNA, 19 nt, Influenza A virus
cgaguaucauugggaucuu

SEQ ID NO: 4704 - RNA, 19 nt, Influenza A virus
gggacucauccuagcucca

SEQ ID NO: 4705 - RNA, 19 nt, Influenza A virus
cagaaugcuguggaugcug

SEQ ID NO: 4706 - RNA, 19 nt, Influenza A virus
gcgaguaucauugggaucu

SEQ ID NO: 4707 - RNA, 19 nt, Influenza A virus
ugggacucauccuagcucc

SEQ ID NO: 4708 - RNA, 19 nt, Influenza A virus
caaauggugcaggcaauga

SEQ ID NO: 4709 - RNA, 19 nt, Influenza A virus
gaguaucauugggaucuug

SEQ ID NO: 4710 - RNA, 19 nt, Influenza A virus
gacucauccuagcuccagu

SEQ ID NO: 4711 - RNA, 19 nt, Influenza A virus
aaugcuguggaugcugacg

SEQ ID NO: 4712 - RNA, 19 nt, Influenza A virus
aggcaaauggugcaggcaa

SEQ ID NO: 4713 - RNA, 19 nt, Influenza A virus
gcaaauggugcaggcaaug

SEQ ID NO: 4714 - RNA, 19 nt, Influenza A virus
ggcaaauggugcaggcaau

SEQ ID NO: 4715 - RNA, 19 nt, Influenza A virus
augcuguggaugcugacga

SEQ ID NO: 4716 - RNA, 19 nt, Influenza A virus
cugacuaaggggauuuugg

SEQ ID NO: 4717 - RNA, 19 nt, Influenza A virus
ucugacuaaggggauuuug

SEQ ID NO: 4718 - RNA, 19 nt, Influenza A virus
ugcacuugauauuguggau

SEQ ID NO: 4719 - RNA, 19 nt, Influenza A virus
ugacuaaggggauuuuggg

SEQ ID NO: 4720 - RNA, 19 nt, Influenza A virus
gcacuugauauuguggauu

SEQ ID NO: 4721 - RNA, 19 nt, Influenza A virus
uugcacuugauauugugga

SEQ ID NO: 4722 - RNA, 19 nt, Influenza A virus
cguauguucucucuaucgu

SEQ ID NO: 4723 - RNA, 19 nt, Influenza A virus
gaaacguauguucucucua

SEQ ID NO: 4724 - RNA, 19 nt, Influenza A virus
auauuguggauucuugauc

SEQ ID NO: 4725 - RNA, 19 nt, Influenza A virus
acguauguucucucuaucg

SEQ ID NO: 4726 - RNA, 19 nt, Influenza A virus
aacguauguucucucuauc

SEQ ID NO: 4727 - RNA, 19 nt, Influenza A virus
aaacguauguucucucuau

SEQ ID NO: 4728 - RNA, 19 nt, Influenza A virus
ccaggcaaauggugcaggc

SEQ ID NO: 4729 - RNA, 19 nt, Influenza A virus
gauauuguggauucuugau

SEQ ID NO: 4730 - RNA, 19 nt, Influenza A virus
ugauauuguggauucuuga

SEQ ID NO: 4731 - RNA, 19 nt, Influenza A virus
aggucgaaacguauguucu

SEQ ID NO: 4732 - RNA, 19 nt, Influenza A virus
gaggucgaaacguauguuc

SEQ ID NO: 4733 - RNA, 19 nt, Influenza A virus
ggucgaaacguauguucuc

SEQ ID NO: 4734 - RNA, 19 nt, Influenza A virus
gucgaaacguauguucucu

SEQ ID NO: 4735 - RNA, 19 nt, Influenza A virus
cgaaacguauguucucucu

SEQ ID NO: 4736 - RNA, 19 nt, Influenza A virus
ucgaaacguauguucucuc

SEQ ID NO: 4737 - RNA, 19 nt, Influenza A virus
uauuguggauucuugaucg

SEQ ID NO: 4738 - RNA, 19 nt, Influenza A virus
cacuugauauuguggauuc

SEQ ID NO: 4739 - RNA, 19 nt, Influenza A virus
acuugauauuguggauucu

SEQ ID NO: 4740 - RNA, 19 nt, Influenza A virus
cuugauauuguggauucuu

SEQ ID NO: 4741 - RNA, 19 nt, Influenza A virus
gccaggcaaauggugcagg

SEQ ID NO: 4742 - RNA, 19 nt, Influenza A virus
uugauauuguggauucuug

SEQ ID NO: 4743 - RNA, 19 nt, Influenza A virus
cgcagagacuugaagaugu

SEQ ID NO: 4744 - RNA, 19 nt, Influenza A virus
gcgcagagacuugaagaug

SEQ ID NO: 4745 - RNA, 19 nt, Influenza A virus
ggccaggcaaauggugcag

SEQ ID NO: 4746 - RNA, 19 nt, Influenza A virus
aggccaggcaaauggugca

SEQ ID NO: 4747 - RNA, 19 nt, Influenza A virus
auuguggauucuugaucgu

SEQ ID NO: 4748 - RNA, 19 nt, Influenza A virus
uuguggauucuugaucguc

SEQ ID NO: 4749 - RNA, 19 nt, Influenza A virus
caggcaaauggugcaggca

SEQ ID NO: 4750 - RNA, 19 nt, Influenza A virus
gggccuucuacggaaggag

SEQ ID NO: 4751 - RNA, 19 nt, Influenza A virus
ggccuucuacggaaggagu

SEQ ID NO: 4752 - RNA, 19 nt, Influenza A virus
cgcgcagagacuugaagau

SEQ ID NO: 4753 - RNA, 19 nt, Influenza A virus
ucgcgcagagacuugaaga

SEQ ID NO: 4754 - RNA, 19 nt, Influenza A virus
aucgcgcagagacuugaag

SEQ ID NO: 4755 - RNA, 19 nt, Influenza A virus
caggccaggcaaauggugc

SEQ ID NO: 4756 - RNA, 19 nt, Influenza A virus
gcagagacuugaagauguc

SEQ ID NO: 4757 - RNA, 19 nt, Influenza A virus
auccugucaccucugacua

SEQ ID NO: 4758 - RNA, 19 nt, Influenza A virus
uccugucaccucugacuaa

SEQ ID NO: 4759 - RNA, 19 nt, Influenza A virus
ucaggccaggcaaauggug

SEQ ID NO: 4760 - RNA, 19 nt, Influenza A virus
uauguucucucuaucguuc

SEQ ID NO: 4761 - RNA, 19 nt, Influenza A virus
agucaggccaggcaaaugg

SEQ ID NO: 4762 - RNA, 19 nt, Influenza A virus
guauguucucucuaucguu

SEQ ID NO: 4763 - RNA, 19 nt, Influenza A virus
gucaggccaggcaaauggu

SEQ ID NO: 4764 - RNA, 19 nt, Influenza A virus
auguucucucuaucguucc

SEQ ID NO: 4765 - RNA, 19 nt, Influenza A virus
uagucaggccaggcaaaug

SEQ ID NO: 4766 - RNA, 19 nt, Influenza A virus
cuagucaggccaggcaaau

SEQ ID NO: 4767 - RNA, 19 nt, Influenza A virus
gcuagucaggccaggcaaa

SEQ ID NO: 4768 - RNA, 19 nt, Influenza A virus
ugcuagucaggccaggcaa

SEQ ID NO: 4769 - RNA, 19 nt, Influenza A virus
uugcugacucccagcacag

SEQ ID NO: 4770 - RNA, 19 nt, Influenza A virus
auugcugacucccagcaca

SEQ ID NO: 4771 - RNA, 19 nt, Influenza A virus
gauugcugacucccagcac

SEQ ID NO: 4772 - RNA, 19 nt, Influenza A virus
gcugacucccagcacaggu

SEQ ID NO: 4773 - RNA, 19 nt, Influenza A virus
cagaugcaacgauucaagu

SEQ ID NO: 4774 - RNA, 19 nt, Influenza A virus
cugacucccagcacagguc

SEQ ID NO: 4775 - RNA, 19 nt, Influenza A virus
gcagaugcaacgauucaag

SEQ ID NO: 4776 - RNA, 19 nt, Influenza A virus
ugcugacucccagcacagg

SEQ ID NO: 4777 - RNA, 19 nt, Influenza A virus
ggaauggggauccaaauaa

SEQ ID NO: 4778 - RNA, 19 nt, Influenza A virus
gggaauggggauccaaaua

SEQ ID NO: 4779 - RNA, 19 nt, Influenza A virus
gagggccuucuacggaagg

SEQ ID NO: 4780 - RNA, 19 nt, Influenza A virus
aucuugcacuugauauugu

SEQ ID NO: 4781 - RNA, 19 nt, Influenza A virus
ucuugcacuugauauugug

SEQ ID NO: 4782 - RNA, 19 nt, Influenza A virus
cuugcacuugauauugugg

SEQ ID NO: 4783 - RNA, 19 nt, Influenza A virus
augggaauggggauccaaa

SEQ ID NO: 4784 - RNA, 19 nt, Influenza A virus
agggccuucuacggaagga

SEQ ID NO: 4785 - RNA, 19 nt, Influenza A virus
aaugggaauggggauccaa

SEQ ID NO: 4786 - RNA, 19 nt, Influenza A virus
gaugcaacgauucaaguga

SEQ ID NO: 4787 - RNA, 19 nt, Influenza A virus
acauuccauggggccaaag

SEQ ID NO: 4788 - RNA, 19 nt, Influenza A virus
agaugcaacgauucaagug

SEQ ID NO: 4789 - RNA, 19 nt, Influenza A virus
aaaagagggccuucuacgg

SEQ ID NO: 4790 - RNA, 19 nt, Influenza A virus
cauuccauggggccaaaga

SEQ ID NO: 4791 - RNA, 19 nt, Influenza A virus
aggcaaaugguggcaacaa

SEQ ID NO: 4792 - RNA, 19 nt, Influenza A virus
ggcaaaugguggcaacaac

SEQ ID NO: 4793 - RNA, 19 nt, Influenza A virus
caaaugguggcaacaacca

SEQ ID NO: 4794 - RNA, 19 nt, Influenza A virus
auuccauggggccaaagaa

SEQ ID NO: 4795 - RNA, 19 nt, Influenza A virus
aaaugguggcaacaaccaa

SEQ ID NO: 4796 - RNA, 19 nt, Influenza A virus
aacuuaagagggagauaac

SEQ ID NO: 4797 - RNA, 19 nt, Influenza A virus
agagggccuucuacggaag

SEQ ID NO: 4798 - RNA, 19 nt, Influenza A virus
ugggaauggggauccaaau

SEQ ID NO: 4799 - RNA, 19 nt, Influenza A virus
aagagggccuucuacggaa

SEQ ID NO: 4800 - RNA, 19 nt, Influenza A virus
aaacuuaagagggagauaa

SEQ ID NO: 4801 - RNA, 19 nt, Influenza A virus
aaagagggccuucuacgga

SEQ ID NO: 4802 - RNA, 19 nt, Influenza A virus
cagucauuuugucagcaua

SEQ ID NO: 4803 - RNA, 19 nt, Influenza A virus
ccugucaccucugacuaag

SEQ ID NO: 4804 - RNA, 19 nt, Influenza A virus
gcaaaugguggcaacaacc

SEQ ID NO: 4805 - RNA, 19 nt, Influenza A virus
ugcuguggaugcugacgac

SEQ ID NO: 4806 - RNA, 19 nt, Influenza A virus
acagucauuuugucagcau

SEQ ID NO: 4807 - RNA, 19 nt, Influenza A virus
aucaggcccccucaaagcc

SEQ ID NO: 4808 - RNA, 19 nt, Influenza A virus
ccaucaggcccccucaaag

SEQ ID NO: 4809 - RNA, 19 nt, Influenza A virus
ggaucuugcacuugauauu

SEQ ID NO: 4810 - RNA, 19 nt, Influenza A virus
caucaggcccccucaaagc

SEQ ID NO: 4811 - RNA, 19 nt, Influenza A virus
gggaucuugcacuugauau

SEQ ID NO: 4812 - RNA, 19 nt, Influenza A virus
gaucuugcacuugauauug

SEQ ID NO: 4813 - RNA, 19 nt, Influenza A virus
ggaugcugacgacagucau

SEQ ID NO: 4814 - RNA, 19 nt, Influenza A virus
gcuguggaugcugacgaca

SEQ ID NO: 4815 - RNA, 19 nt, Influenza A virus
augcugacgacagucauuu

SEQ ID NO: 4816 - RNA, 19 nt, Influenza A virus
uggaugcugacgacaguca

SEQ ID NO: 4817 - RNA, 19 nt, Influenza A virus
gaugcugacgacagucauu

SEQ ID NO: 4818 - RNA, 19 nt, Influenza A virus
cuguggaugcugacgacag

SEQ ID NO: 4819 - RNA, 19 nt, Influenza A virus
ugcugacgacagucauuuu

SEQ ID NO: 4820 - RNA, 19 nt, Influenza A virus
uguggaugcugacgacagu

SEQ ID NO: 4821 - RNA, 19 nt, Influenza A virus
guggaugcugacgacaguc

SEQ ID NO: 4822 - RNA, 19 nt, Influenza A virus
gccuucuacggaaggagua

SEQ ID NO: 4823 - RNA, 19 nt, Influenza A virus
gcugacgacagucauuuug

SEQ ID NO: 4824 - RNA, 19 nt, Influenza A virus
acgacagucauuuugucag

SEQ ID NO: 4825 - RNA, 19 nt, Influenza A virus
gacgacagucauuuuguca

SEQ ID NO: 4826 - RNA, 19 nt, Influenza A virus
ugacgacagucauuuuguc

SEQ ID NO: 4827 - RNA, 19 nt, Influenza A virus
cugacgacagucauuuugu

SEQ ID NO: 4828 - RNA, 19 nt, Influenza A virus
gacagucauuuugucagca

SEQ ID NO: 4829 - RNA, 19 nt, Influenza A virus
cgacagucauuuugucagc

SEQ ID NO: 4830 - RNA, 19 nt, Influenza A virus
ugguggcaacaaccaaucc

SEQ ID NO: 4831 - RNA, 19 nt, Influenza A virus
aaugguggcaacaaccaau

SEQ ID NO: 4832 - RNA, 19 nt, Influenza A virus
gguggcaacaaccaaucca

SEQ ID NO: 4833 - RNA, 19 nt, Influenza A virus
augguggcaacaaccaauc

SEQ ID NO: 4834 - RNA, 19 nt, Influenza A virus
aagacaagaccaauccugu

SEQ ID NO: 4835 - RNA, 19 nt, Influenza A virus
caagaccaauccugucacc

SEQ ID NO: 4836 - RNA, 19 nt, Influenza A virus
uaggcaaaugguggcaaca

SEQ ID NO: 4837 - RNA, 19 nt, Influenza A virus
gacaagaccaauccuguca

SEQ ID NO: 4838 - RNA, 19 nt, Influenza A virus
agacaagaccaauccuguc

SEQ ID NO: 4839 - RNA, 19 nt, Influenza A virus
gaccaauccugucaccucu

SEQ ID NO: 4840 - RNA, 19 nt, Influenza A virus
agaccaauccugucaccuc

SEQ ID NO: 4841 - RNA, 19 nt, Influenza A virus
gcuaaagacaagaccaauc

SEQ ID NO: 4842 - RNA, 19 nt, Influenza A virus
acaagaccaauccugucac

SEQ ID NO: 4843 - RNA, 19 nt, Influenza A virus
aagaccaauccugucaccu

SEQ ID NO: 4844 - RNA, 19 nt, Influenza A virus
auaggcaaaugguggcaac

SEQ ID NO: 4845 - RNA, 19 nt, Influenza A virus
uaaagacaagaccaauccu

SEQ ID NO: 4846 - RNA, 19 nt, Influenza A virus
aaagacaagaccaauccug

SEQ ID NO: 4847 - RNA, 19 nt, Influenza A virus
cuaaagacaagaccaaucc

SEQ ID NO: 4848 - RNA, 19 nt, Influenza A virus
caauccugucaccucugac

SEQ ID NO: 4849 - RNA, 19 nt, Influenza A virus
cauaggcaaaugguggcaa

SEQ ID NO: 4850 - RNA, 19 nt, Influenza A virus
aaggaacagcagaaugcug

SEQ ID NO: 4851 - RNA, 19 nt, Influenza A virus
ccaauccugucaccucuga

SEQ ID NO: 4852 - RNA, 19 nt, Influenza A virus
acaaccaauccauuaauaa

SEQ ID NO: 4853 - RNA, 19 nt, Influenza A virus
auaacauuccauggggcca

SEQ ID NO: 4854 - RNA, 19 nt, Influenza A virus
uaacauuccauggggccaa

SEQ ID NO: 4855 - RNA, 19 nt, Influenza A virus
agauaacauuccauggggc

SEQ ID NO: 4856 - RNA, 19 nt, Influenza A virus
gagauaacauuccaugggg

SEQ ID NO: 4857 - RNA, 19 nt, Influenza A virus
aacauuccauggggccaaa

SEQ ID NO: 4858 - RNA, 19 nt, Influenza A virus
caacaaccaauccauuaau

SEQ ID NO: 4859 - RNA, 19 nt, Influenza A virus
aacaaccaauccauuaaua

SEQ ID NO: 4860 - RNA, 19 nt, Influenza A virus
accaauccugucaccucug

SEQ ID NO: 4861 - RNA, 19 nt, Influenza A virus
gaaaggaacagcagaaugc

SEQ ID NO: 4862 - RNA, 19 nt, Influenza A virus
aaaggaacagcagaaugcu

SEQ ID NO: 4863 - RNA, 19 nt, Influenza A virus
gggagauaacauuccaugg

SEQ ID NO: 4864 - RNA, 19 nt, Influenza A virus
cgaaaggaacagcagaaug

SEQ ID NO: 4865 - RNA, 19 nt, Influenza A virus
ggagauaacauuccauggg

SEQ ID NO: 4866 - RNA, 19 nt, Influenza A virus
aauccugucaccucugacu

SEQ ID NO: 4867 - RNA, 19 nt, Influenza A virus
agggagauaacauuccaug

SEQ ID NO: 4868 - RNA, 19 nt, Influenza A virus
gauaacauuccauggggcc

SEQ ID NO: 4869 - RNA, 19 nt, Influenza A virus
aucgaaaggaacagcagaa

SEQ ID NO: 4870 - RNA, 19 nt, Influenza A virus
uugaaaauuugcagaccua

SEQ ID NO: 4871 - RNA, 19 nt, Influenza A virus
cuucuugaaaauuugcaga

SEQ ID NO: 4872 - RNA, 19 nt, Influenza A virus
ucuugaaaauuugcagacc

SEQ ID NO: 4873 - RNA, 19 nt, Influenza A virus
cuugaaaauuugcagaccu

SEQ ID NO: 4874 - RNA, 19 nt, Influenza A virus
uucuugaaaauuugcagac

SEQ ID NO: 4875 - RNA, 19 nt, Influenza A virus
ucgaaaggaacagcagaau

SEQ ID NO: 4876 - RNA, 19 nt, Influenza A virus
cccagugagcgaggacugc

SEQ ID NO: 4877 - RNA, 19 nt, Influenza A virus
cauuuugucagcauagagc

SEQ ID NO: 4878 - RNA, 19 nt, Influenza A virus
ccagugagcgaggacugca

SEQ ID NO: 4879 - RNA, 19 nt, Influenza A virus
gugcccagugagcgaggac

SEQ ID NO: 4880 - RNA, 19 nt, Influenza A virus
gcccagugagcgaggacug

SEQ ID NO: 4881 - RNA, 19 nt, Influenza A virus
ugcccagugagcgaggacu

SEQ ID NO: 4882 - RNA, 19 nt, Influenza A virus
cuuaagagggagauaacau

SEQ ID NO: 4883 - RNA, 19 nt, Influenza A virus
uuaagagggagauaacauu

SEQ ID NO: 4884 - RNA, 19 nt, Influenza A virus
caccgugcccagugagcga

SEQ ID NO: 4885 - RNA, 19 nt, Influenza A virus
aauggugcaggcaaugaga

SEQ ID NO: 4886 - RNA, 19 nt, Influenza A virus
aagagggagauaacauucc

SEQ ID NO: 4887 - RNA, 19 nt, Influenza A virus
cgugcccagugagcgagga

SEQ ID NO: 4888 - RNA, 19 nt, Influenza A virus
ccgugcccagugagcgagg

SEQ ID NO: 4889 - RNA, 19 nt, Influenza A virus
gagggagauaacauuccau

SEQ ID NO: 4890 - RNA, 19 nt, Influenza A virus
agagggagauaacauucca

SEQ ID NO: 4891 - RNA, 19 nt, Influenza A virus
accgugcccagugagcgag

SEQ ID NO: 4892 - RNA, 19 nt, Influenza A virus
uguucucucuaucguucca

SEQ ID NO: 4893 - RNA, 19 nt, Influenza A virus
aaaaacacagaucuugagg

SEQ ID NO: 4894 - RNA, 19 nt, Influenza A virus
auuuugucagcauagagcu

SEQ ID NO: 4895 - RNA, 19 nt, Influenza A virus
uucucucuaucguuccauc

SEQ ID NO: 4896 - RNA, 19 nt, Influenza A virus
guucucucuaucguuccau

SEQ ID NO: 4897 - RNA, 19 nt, Influenza A virus
ggaaaaacacagaucuuga

SEQ ID NO: 4898 - RNA, 19 nt, Influenza A virus
aaacacagaucuugaggcu

SEQ ID NO: 4899 - RNA, 19 nt, Influenza A virus
gggaaaaacacagaucuug

SEQ ID NO: 4900 - RNA, 19 nt, Influenza A virus
aaaacacagaucuugaggc

SEQ ID NO: 4901 - RNA, 19 nt, Influenza A virus
uaagagggagauaacauuc

SEQ ID NO: 4902 - RNA, 19 nt, Influenza A virus
gaugucuuugcugggaaaa

SEQ ID NO: 4903 - RNA, 19 nt, Influenza A virus
gaaaaacacagaucuugag

SEQ ID NO: 4904 - RNA, 19 nt, Influenza A virus
ucucucuaucguuccauca

SEQ ID NO: 4905 - RNA, 19 nt, Influenza A virus
uccaucaggcccccucaaa

SEQ ID NO: 4906 - RNA, 19 nt, Influenza A virus
uuccaucaggcccccucaa

SEQ ID NO: 4907 - RNA, 19 nt, Influenza A virus
cucucuaucguuccaucag

SEQ ID NO: 4908 - RNA, 19 nt, Influenza A virus
guuccaucaggcccccuca

SEQ ID NO: 4909 - RNA, 19 nt, Influenza A virus
ucuaucguuccaucaggcc

SEQ ID NO: 4910 - RNA, 19 nt, Influenza A virus
ugucuuugcugggaaaaac

SEQ ID NO: 4911 - RNA, 19 nt, Influenza A virus
uaucguuccaucaggcccc

SEQ ID NO: 4912 - RNA, 19 nt, Influenza A virus
gucuuugcugggaaaaaca

SEQ ID NO: 4913 - RNA, 19 nt, Influenza A virus
augucuuugcugggaaaaa

SEQ ID NO: 4914 - RNA, 19 nt, Influenza A virus
ucuuugcugggaaaaacac

SEQ ID NO: 4915 - RNA, 19 nt, Influenza A virus
cguuccaucaggcccccuc

SEQ ID NO: 4916 - RNA, 19 nt, Influenza A virus
cuaucguuccaucaggccc

SEQ ID NO: 4917 - RNA, 19 nt, Influenza A virus
cucuaucguuccaucaggc

SEQ ID NO: 4918 - RNA, 19 nt, Influenza A virus
ucguuccaucaggcccccu

SEQ ID NO: 4919 - RNA, 19 nt, Influenza A virus
aucguuccaucaggccccc

SEQ ID NO: 4920 - RNA, 19 nt, Influenza A virus
ucucuaucguuccaucagg

SEQ ID NO: 4921 - RNA, 19 nt, Influenza A virus
ggaucaagugagcaggcag

SEQ ID NO: 4922 - RNA, 19 nt, Influenza A virus
cuaaccgaggucgaaacgu

SEQ ID NO: 4923 - RNA, 19 nt, Influenza A virus
auggcuggaucaagugagc

SEQ ID NO: 4924 - RNA, 19 nt, Influenza A virus
gaucaagugagcaggcagc

SEQ ID NO: 4925 - RNA, 19 nt, Influenza A virus
uggcuggaucaagugagca

SEQ ID NO: 4926 - RNA, 19 nt, Influenza A virus
uucuaaccgaggucgaaac

SEQ ID NO: 4927 - RNA, 19 nt, Influenza A virus
uaaccgaggucgaaacgua

SEQ ID NO: 4928 - RNA, 19 nt, Influenza A virus
ucuaaccgaggucgaaacg

SEQ ID NO: 4929 - RNA, 19 nt, Influenza A virus
gcugggaaaaacacagauc

SEQ ID NO: 4930 - RNA, 19 nt, Influenza A virus
ugcugggaaaaacacagau

SEQ ID NO: 4931 - RNA, 19 nt, Influenza A virus
ucaagugagcaggcagcgg

SEQ ID NO: 4932 - RNA, 19 nt, Influenza A virus
caagugagcaggcagcgga

SEQ ID NO: 4933 - RNA, 19 nt, Influenza A virus
cugggaaaaacacagaucu

SEQ ID NO: 4934 - RNA, 19 nt, Influenza A virus
ugguaugugcaacauguga

SEQ ID NO: 4935 - RNA, 19 nt, Influenza A virus
uugcugggaaaaacacaga

SEQ ID NO: 4936 - RNA, 19 nt, Influenza A virus
agaugucuuugcugggaaa

SEQ ID NO: 4937 - RNA, 19 nt, Influenza A virus
uuugcugggaaaaacacag

SEQ ID NO: 4938 - RNA, 19 nt, Influenza A virus
ugggaaaaacacagaucuu

SEQ ID NO: 4939 - RNA, 19 nt, Influenza A virus
cuuugcugggaaaaacaca

SEQ ID NO: 4940 - RNA, 19 nt, Influenza A virus
cugguaugugcaacaugug

SEQ ID NO: 4941 - RNA, 19 nt, Influenza A virus
cuucuaaccgaggucgaaa

SEQ ID NO: 4942 - RNA, 19 nt, Influenza A virus
cgaggacugcagcguagac

SEQ ID NO: 4943 - RNA, 19 nt, Influenza A virus
gagcgaggacugcagcgua

SEQ ID NO: 4944 - RNA, 19 nt, Influenza A virus
gaggacugcagcguagacg

SEQ ID NO: 4945 - RNA, 19 nt, Influenza A virus
ugagcgaggacugcagcgu

SEQ ID NO: 4946 - RNA, 19 nt, Influenza A virus
gguuuguguucacgcucac

SEQ ID NO: 4947 - RNA, 19 nt, Influenza A virus
ggguuuguguucacgcuca

SEQ ID NO: 4948 - RNA, 19 nt, Influenza A virus
cacucaguuauucugcugg

SEQ ID NO: 4949 - RNA, 19 nt, Influenza A virus
aaauggcuggaucaaguga

SEQ ID NO: 4950 - RNA, 19 nt, Influenza A virus
gcgaggacugcagcguaga

SEQ ID NO: 4951 - RNA, 19 nt, Influenza A virus
caaauggcuggaucaagug

SEQ ID NO: 4952 - RNA, 19 nt, Influenza A virus
agugagcgaggacugcagc

SEQ ID NO: 4953 - RNA, 19 nt, Influenza A virus
gugagcgaggacugcagcg

SEQ ID NO: 4954 - RNA, 19 nt, Influenza A virus
acucaguuauucugcuggu

SEQ ID NO: 4955 - RNA, 19 nt, Influenza A virus
agcgaggacugcagcguag

SEQ ID NO: 4956 - RNA, 19 nt, Influenza A virus
guuuguguucacgcucacc

SEQ ID NO: 4957 - RNA, 19 nt, Influenza A virus
cagugagcgaggacugcag

SEQ ID NO: 4958 - RNA, 19 nt, Influenza A virus
ggauccaaauaacauggac

SEQ ID NO: 4959 - RNA, 19 nt, Influenza A virus
gggauccaaauaacaugga

SEQ ID NO: 4960 - RNA, 19 nt, Influenza A virus
gcacucaguuauucugcug

SEQ ID NO: 4961 - RNA, 19 nt, Influenza A virus
uggccugguaugugcaaca

SEQ ID NO: 4962 - RNA, 19 nt, Influenza A virus
ggggauccaaauaacaugg

SEQ ID NO: 4963 - RNA, 19 nt, Influenza A virus
gccugguaugugcaacaug

SEQ ID NO: 4964 - RNA, 19 nt, Influenza A virus
ggccugguaugugcaacau

SEQ ID NO: 4965 - RNA, 19 nt, Influenza A virus
ccugguaugugcaacaugu

SEQ ID NO: 4966 - RNA, 19 nt, Influenza A virus
gagcaaauggcuggaucaa

SEQ ID NO: 4967 - RNA, 19 nt, Influenza A virus
ggagcaaauggcuggauca

SEQ ID NO: 4968 - RNA, 19 nt, Influenza A virus
agcaaauggcuggaucaag

SEQ ID NO: 4969 - RNA, 19 nt, Influenza A virus
gcaaauggcuggaucaagu

SEQ ID NO: 4970 - RNA, 19 nt, Influenza A virus
uggggccaaagaaauagca

SEQ ID NO: 4971 - RNA, 19 nt, Influenza A virus
ggggccaaagaaauagcac

SEQ ID NO: 4972 - RNA, 19 nt, Influenza A virus
gggccaaagaaauagcacu

SEQ ID NO: 4973 - RNA, 19 nt, Influenza A virus
ggcuggaucaagugagcag

SEQ ID NO: 4974 - RNA, 19 nt, Influenza A virus
uagcacucaguuauucugc

SEQ ID NO: 4975 - RNA, 19 nt, Influenza A virus
auagcacucaguuauucug

SEQ ID NO: 4976 - RNA, 19 nt, Influenza A virus
aagaaauagcacucaguua

SEQ ID NO: 4977 - RNA, 19 nt, Influenza A virus
gcuggaucaagugagcagg

SEQ ID NO: 4978 - RNA, 19 nt, Influenza A virus
aaagaaauagcacucaguu

SEQ ID NO: 4979 - RNA, 19 nt, Influenza A virus
cuggaucaagugagcaggc

SEQ ID NO: 4980 - RNA, 19 nt, Influenza A virus
aauagcacucaguuauucu

SEQ ID NO: 4981 - RNA, 19 nt, Influenza A virus
uggaucaagugagcaggca

SEQ ID NO: 4982 - RNA, 19 nt, Influenza A virus
agcacucaguuauucugcu

SEQ ID NO: 4983 - RNA, 19 nt, Influenza A virus
gaaauagcacucaguuauu

SEQ ID NO: 4984 - RNA, 19 nt, Influenza A virus
aaauagcacucaguuauuc

SEQ ID NO: 4985 - RNA, 19 nt, Influenza A virus
aauggcuggaucaagugag

SEQ ID NO: 4986 - RNA, 19 nt, Influenza A virus
aauggggauccaaauaaca

SEQ ID NO: 4987 - RNA, 19 nt, Influenza A virus
agaaauagcacucaguuau

SEQ ID NO: 4988 - RNA, 19 nt, Influenza A virus
uggggauccaaauaacaug

SEQ ID NO: 4989 - RNA, 19 nt, Influenza A virus
auggggauccaaauaacau

SEQ ID NO: 4990 - RNA, 19 nt, Influenza A virus
ggccaaagaaauagcacuc

SEQ ID NO: 4991 - RNA, 19 nt, Influenza A virus
gccaaagaaauagcacuca

SEQ ID NO: 4992 - RNA, 19 nt, Influenza A virus
ccaaagaaauagcacucag

SEQ ID NO: 4993 - RNA, 19 nt, Influenza A virus
caaagaaauagcacucagu

SEQ ID NO: 4994 - RNA, 19 nt, Influenza A virus
gaauggggauccaaauaac

SEQ ID NO: 4995 - RNA, 19 nt, Influenza A virus
caggcagcggaggccaugg

SEQ ID NO: 4996 - RNA, 19 nt, Influenza A virus
aggcagcggaggccaugga

SEQ ID NO: 4997 - RNA, 19 nt, Influenza A virus
gugagcaggcagcggaggc

SEQ ID NO: 4998 - RNA, 19 nt, Influenza A virus
auugcuagucaggccaggc

SEQ ID NO: 4999 - RNA, 19 nt, Influenza A virus
agugagcaggcagcggagg

SEQ ID NO: 5000 - RNA, 19 nt, Influenza A virus
aagugagcaggcagcggag

SEQ ID NO: 5001 - RNA, 19 nt, Influenza A virus
gagcaggcagcggaggcca

SEQ ID NO: 5002 - RNA, 19 nt, Influenza A virus
gcaggcagcggaggccaug

SEQ ID NO: 5003 - RNA, 19 nt, Influenza A virus
agcaggcagcggaggccau

SEQ ID NO: 5004 - RNA, 19 nt, Influenza A virus
ugagcaggcagcggaggcc

SEQ ID NO: 5005 - RNA, 19 nt, Influenza A virus
aggacugcagcguagacgc

SEQ ID NO: 5006 - RNA, 19 nt, Influenza A virus
acaugugaacagauugcug

SEQ ID NO: 5007 - RNA, 19 nt, Influenza A virus
caugugaacagauugcuga

SEQ ID NO: 5008 - RNA, 19 nt, Influenza A virus
augugaacagauugcugac

SEQ ID NO: 5009 - RNA, 19 nt, Influenza A virus
gauauugaaagaugagccu

SEQ ID NO: 5010 - RNA, 19 nt, Influenza A virus
uauugaaagaugagccuuc

SEQ ID NO: 5011 - RNA, 19 nt, Influenza A virus
agauauugaaagaugagcc

SEQ ID NO: 5012 - RNA, 19 nt, Influenza A virus
auugaaagaugagccuucu

SEQ ID NO: 5013 - RNA, 19 nt, Influenza A virus
auauugaaagaugagccuu

SEQ ID NO: 5014 - RNA, 19 nt, Influenza A virus
augguuuuggccagcacua

SEQ ID NO: 5015 - RNA, 19 nt, Influenza A virus
ugguuuuggccagcacuac

SEQ ID NO: 5016 - RNA, 19 nt, Influenza A virus
uagauauugaaagaugagc

SEQ ID NO: 5017 - RNA, 19 nt, Influenza A virus
ugugcaacaugugaacaga

SEQ ID NO: 5018 - RNA, 19 nt, Influenza A virus
cgucuuuuuuucaaaugca

SEQ ID NO: 5019 - RNA, 19 nt, Influenza A virus
ugaaaagagggccuucuac

SEQ ID NO: 5020 - RNA, 19 nt, Influenza A virus
gugcaacaugugaacagau

SEQ ID NO: 5021 - RNA, 19 nt, Influenza A virus
auaacacaguucgagucuc

SEQ ID NO: 5022 - RNA, 19 nt, Influenza A virus
uaacacaguucgagucucu

SEQ ID NO: 5023 - RNA, 19 nt, Influenza A virus
ugaauggaaugauaacaca

SEQ ID NO: 5024 - RNA, 19 nt, Influenza A virus
gaauggaaugauaacacag

SEQ ID NO: 5025 - RNA, 19 nt, Influenza A virus
uggaaugauaacacaguuc

SEQ ID NO: 5026 - RNA, 19 nt, Influenza A virus
auggaaugauaacacaguu

SEQ ID NO: 5027 - RNA, 19 nt, Influenza A virus
aauggaaugauaacacagu

SEQ ID NO: 5028 - RNA, 19 nt, Influenza A virus
uugaauggaaugauaacac

SEQ ID NO: 5029 - RNA, 19 nt, Influenza A virus
ugauaacacaguucgaguc

SEQ ID NO: 5030 - RNA, 19 nt, Influenza A virus
augauaacacaguucgagu

SEQ ID NO: 5031 - RNA, 19 nt, Influenza A virus
ggaaugauaacacaguucg

SEQ ID NO: 5032 - RNA, 19 nt, Influenza A virus
gaaugauaacacaguucga

SEQ ID NO: 5033 - RNA, 19 nt, Influenza A virus
aaugauaacacaguucgag

SEQ ID NO: 5034 - RNA, 19 nt, Influenza A virus
cuugaauggaaugauaaca

SEQ ID NO: 5035 - RNA, 19 nt, Influenza A virus
gauaacacaguucgagucu

SEQ ID NO: 5036 - RNA, 19 nt, Influenza A virus
augucaaaaaugcaauugg

SEQ ID NO: 5037 - RNA, 19 nt, Influenza A virus
ggaugucaaaaaugcaauu

SEQ ID NO: 5038 - RNA, 19 nt, Influenza A virus
aggaugucaaaaaugcaau

SEQ ID NO: 5039 - RNA, 19 nt, Influenza A virus
gaggaugucaaaaaugcaa

SEQ ID NO: 5040 - RNA, 19 nt, Influenza A virus
gaugucaaaaaugcaauug

SEQ ID NO: 5041 - RNA, 19 nt, Influenza A virus
ugaggaugucaaaaaugca

SEQ ID NO: 5042 - RNA, 19 nt, Influenza A virus
cggcuucgccgagaucaga

SEQ ID NO: 5043 - RNA, 19 nt, Influenza A virus
ugucaaaaaugcaauuggg

SEQ ID NO: 5044 - RNA, 19 nt, Influenza A virus
ucuacagagauucgcuugg

SEQ ID NO: 5045 - RNA, 19 nt, Influenza A virus
gcaauugggguccucaucg

SEQ ID NO: 5046 - RNA, 19 nt, Influenza A virus
caauugggguccucaucgg

SEQ ID NO: 5047 - RNA, 19 nt, Influenza A virus
ugcaauugggguccucauc

SEQ ID NO: 5048 - RNA, 19 nt, Influenza A virus
ucaaaaaugcaauuggggu

SEQ ID NO: 5049 - RNA, 19 nt, Influenza A virus
gucaaaaaugcaauugggg

SEQ ID NO: 5050 - RNA, 19 nt, Influenza A virus
aaaaaugcaauuggggucc

SEQ ID NO: 5051 - RNA, 19 nt, Influenza A virus
aaaaugcaauugggguccu

SEQ ID NO: 5052 - RNA, 19 nt, Influenza A virus
augcaauugggguccucau

SEQ ID NO: 5053 - RNA, 19 nt, Influenza A virus
caaaaaugcaauugggguc

SEQ ID NO: 5054 - RNA, 19 nt, Influenza A virus
aaaugcaauugggguccuc

SEQ ID NO: 5055 - RNA, 19 nt, Influenza A virus
aaugcaauugggguccuca

SEQ ID NO: 5056 - RNA, 19 nt, Influenza A virus
ugaaagcgaauuucagugu

SEQ ID NO: 5057 - RNA, 19 nt, Influenza A virus
uugaucggcuucgccgaga

SEQ ID NO: 5058 - RNA, 19 nt, Influenza A virus
cuugaucggcuucgccgag

SEQ ID NO: 5059 - RNA, 19 nt, Influenza A virus
gaaagcgaauuucagugug

SEQ ID NO: 5060 - RNA, 19 nt, Influenza A virus
aucggcuucgccgagauca

SEQ ID NO: 5061 - RNA, 19 nt, Influenza A virus
gaucggcuucgccgagauc

SEQ ID NO: 5062 - RNA, 19 nt, Influenza A virus
ugaucggcuucgccgagau

SEQ ID NO: 5063 - RNA, 19 nt, Influenza A virus
ucggcuucgccgagaucag

SEQ ID NO: 5064 - RNA, 19 nt, Influenza A virus
gagcaauuguuggcgaaau

SEQ ID NO: 5065 - RNA, 19 nt, Influenza A virus
ggagcaauuguuggcgaaa

SEQ ID NO: 5066 - RNA, 19 nt, Influenza A virus
uuccuugaucggcuucgcc

SEQ ID NO: 5067 - RNA, 19 nt, Influenza A virus
uccuugaucggcuucgccg

SEQ ID NO: 5068 - RNA, 19 nt, Influenza A virus
gggagcaauuguuggcgaa

SEQ ID NO: 5069 - RNA, 19 nt, Influenza A virus
agggagcaauuguuggcga

SEQ ID NO: 5070 - RNA, 19 nt, Influenza A virus
ccuugaucggcuucgccga

SEQ ID NO: 5071 - RNA, 19 nt, Influenza A virus
gagggagcaauuguuggcg

SEQ ID NO: 5072 - RNA, 19 nt, Influenza A virus
agggcuuucaccgaagagg

SEQ ID NO: 5073 - RNA, 19 nt, Influenza A virus
gggcuuucaccgaagaggg

SEQ ID NO: 5074 - RNA, 19 nt, Influenza A virus
auaagauggcugauugaag

SEQ ID NO: 5075 - RNA, 19 nt, Influenza A virus
uaagauggcugauugaaga

SEQ ID NO: 5076 - RNA, 19 nt, Influenza A virus
aagauggcugauugaagaa

SEQ ID NO: 5077 - RNA, 19 nt, Influenza A virus
cuaagggcuuucaccgaag

SEQ ID NO: 5078 - RNA, 19 nt, Influenza A virus
aagggcuuucaccgaagag

SEQ ID NO: 5079 - RNA, 19 nt, Influenza A virus
uaagggcuuucaccgaaga

SEQ ID NO: 5080 - RNA, 19 nt, Influenza A virus
gauggcugauugaagaagu

SEQ ID NO: 5081 - RNA, 19 nt, Influenza A virus
agauggcugauugaagaag

SEQ ID NO: 5082 - RNA, 19 nt, Influenza A virus
acuaagggcuuucaccgaa

SEQ ID NO: 5083 - RNA, 19 nt, Influenza A virus
uacuaagggcuuucaccga

SEQ ID NO: 5084 - RNA, 19 nt, Influenza A virus
aaagcgaauuucaguguga

SEQ ID NO: 5085 - RNA, 19 nt, Influenza A virus
aagcgaauuucagugugau

SEQ ID NO: 5086 - RNA, 19 nt, Influenza A virus
ggcuuucaccgaagaggga

SEQ ID NO: 5087 - RNA, 19 nt, Influenza A virus
gcuuucaccgaagagggag

SEQ ID NO: 5088 - RNA, 19 nt, Influenza A virus
auuacuaagggcuuucacc

SEQ ID NO: 5089 - RNA, 19 nt, Influenza A virus
uuacuaagggcuuucaccg

SEQ ID NO: 5090 - RNA, 19 nt, Influenza A virus
aagagggagcaauuguugg

SEQ ID NO: 5091 - RNA, 19 nt, Influenza A virus
gaagagggagcaauuguug

SEQ ID NO: 5092 - RNA, 19 nt, Influenza A virus
agagggagcaauuguuggc

SEQ ID NO: 5093 - RNA, 19 nt, Influenza A virus
ucaccgaagagggagcaau

SEQ ID NO: 5094 - RNA, 19 nt, Influenza A virus
uuucaccgaagagggagca

SEQ ID NO: 5095 - RNA, 19 nt, Influenza A virus
uucaccgaagagggagcaa

SEQ ID NO: 5096 - RNA, 19 nt, Influenza A virus
cuuucaccgaagagggagc

SEQ ID NO: 5097 - RNA, 19 nt, Influenza A virus
ccgaagagggagcaauugu

SEQ ID NO: 5098 - RNA, 19 nt, Influenza A virus
accgaagagggagcaauug

SEQ ID NO: 5099 - RNA, 19 nt, Influenza A virus
cgaagagggagcaauuguu

SEQ ID NO: 5100 - RNA, 19 nt, Influenza A virus
caccgaagagggagcaauu

SEQ ID NO: 5101 - RNA, 19 nt, Influenza A virus
uugggguccucaucggagg

SEQ ID NO: 5102 - RNA, 19 nt, Influenza A virus
auugggguccucaucggag

SEQ ID NO: 5103 - RNA, 19 nt, Influenza A virus
aauugggguccucaucgga

SEQ ID NO: 5104 - RNA, 19 nt, Influenza A virus
augaggcacuuaaaaugac

SEQ ID NO: 5105 - RNA, 19 nt, Influenza A virus
aacacaguucgagucucua

SEQ ID NO: 5106 - RNA, 19 nt, Influenza A virus
acacaguucgagucucuaa

SEQ ID NO: 5107 - RNA, 19 nt, Influenza A virus
gaugaggcacuuaaaauga

SEQ ID NO: 5108 - RNA, 19 nt, Influenza A virus
acagaaacggaaaauggcg

SEQ ID NO: 5109 - RNA, 19 nt, Influenza A virus
acaguucgagucucuaaaa

SEQ ID NO: 5110 - RNA, 19 nt, Influenza A virus
cacaguucgagucucuaaa

SEQ ID NO: 5111 - RNA, 19 nt, Influenza A virus
aagcaguaaugagaauggg

SEQ ID NO: 5112 - RNA, 19 nt, Influenza A virus
ugaggcacuuaaaaugacc

SEQ ID NO: 5113 - RNA, 19 nt, Influenza A virus
gaagcaguaaugagaaugg

SEQ ID NO: 5114 - RNA, 19 nt, Influenza A virus
gguucaugcuaaugcccaa

SEQ ID NO: 5115 - RNA, 19 nt, Influenza A virus
gaggcacuuaaaaugacca

SEQ ID NO: 5116 - RNA, 19 nt, Influenza A virus
aggcacuuaaaaugaccau

SEQ ID NO: 5117 - RNA, 19 nt, Influenza A virus
acugguucaugcuaaugcc

SEQ ID NO: 5118 - RNA, 19 nt, Influenza A virus
ugguucaugcuaaugccca

SEQ ID NO: 5119 - RNA, 19 nt, Influenza A virus
cugguucaugcuaaugccc

SEQ ID NO: 5120 - RNA, 19 nt, Influenza A virus
ggcacuuaaaaugaccaug

SEQ ID NO: 5121 - RNA, 19 nt, Influenza A virus
uugaaagcgaauuucagug

SEQ ID NO: 5122 - RNA, 19 nt, Influenza A virus
gcacuuaaaaugaccaugg

SEQ ID NO: 5123 - RNA, 19 nt, Influenza A virus
ucaugcuaaugcccaagca

SEQ ID NO: 5124 - RNA, 19 nt, Influenza A virus
uacagagauucgcuuggag

SEQ ID NO: 5125 - RNA, 19 nt, Influenza A virus
uacuauugaggaugucaaa

SEQ ID NO: 5126 - RNA, 19 nt, Influenza A virus
acagagauucgcuuggaga

SEQ ID NO: 5127 - RNA, 19 nt, Influenza A virus
cauacuauugaggauguca

SEQ ID NO: 5128 - RNA, 19 nt, Influenza A virus
guucaugcuaaugcccaag

SEQ ID NO: 5129 - RNA, 19 nt, Influenza A virus
auacuauugaggaugucaa

SEQ ID NO: 5130 - RNA, 19 nt, Influenza A virus
uucaugcuaaugcccaagc

SEQ ID NO: 5131 - RNA, 19 nt, Influenza A virus
uggcugauugaagaaguga

SEQ ID NO: 5132 - RNA, 19 nt, Influenza A virus
ggcugauugaagaagugag

SEQ ID NO: 5133 - RNA, 19 nt, Influenza A virus
acuauugaggaugucaaaa

SEQ ID NO: 5134 - RNA, 19 nt, Influenza A virus
acauacuauugaggauguc

SEQ ID NO: 5135 - RNA, 19 nt, Influenza A virus
cagagauucgcuuggagaa

SEQ ID NO: 5136 - RNA, 19 nt, Influenza A virus
uuccaggacauacuauuga

SEQ ID NO: 5137 - RNA, 19 nt, Influenza A virus
uugaggaugucaaaaaugc

SEQ ID NO: 5138 - RNA, 19 nt, Influenza A virus
caggacauacuauugagga

SEQ ID NO: 5139 - RNA, 19 nt, Influenza A virus
ggacauacuauugaggaug

SEQ ID NO: 5140 - RNA, 19 nt, Influenza A virus
aggacauacuauugaggau

SEQ ID NO: 5141 - RNA, 19 nt, Influenza A virus
ccaggacauacuauugagg

SEQ ID NO: 5142 - RNA, 19 nt, Influenza A virus
gacauacuauugaggaugu

SEQ ID NO: 5143 - RNA, 19 nt, Influenza A virus
uccaggacauacuauugag

SEQ ID NO: 5144 - RNA, 19 nt, Influenza A virus
auggcugauugaagaagug

SEQ ID NO: 5145 - RNA, 19 nt, Influenza A virus
cuauugaggaugucaaaaa

SEQ ID NO: 5146 - RNA, 19 nt, Influenza A virus
auugaggaugucaaaaaug

SEQ ID NO: 5147 - RNA, 19 nt, Influenza A virus
uauugaggaugucaaaaau

SEQ ID NO: 5148 - RNA, 19 nt, Influenza A virus
uauuacuaagggcuuucac

SEQ ID NO: 5149 - RNA, 19 nt, Influenza A virus
ccauuccuugaucggcuuc

SEQ ID NO: 5150 - RNA, 19 nt, Influenza A virus
auuccuugaucggcuucgc

SEQ ID NO: 5151 - RNA, 19 nt, Influenza A virus
gagauucgcuuggagaagc

SEQ ID NO: 5152 - RNA, 19 nt, Influenza A virus
agagauucgcuuggagaag

SEQ ID NO: 5153 - RNA, 19 nt, Influenza A virus
cauuccuugaucggcuucg

SEQ ID NO: 5154 - RNA, 19 nt, Influenza A virus
cuacagagauucgcuugga

SEQ ID NO: 5155 - RNA, 19 nt, Influenza A virus
agauucgcuuggagaagca

SEQ ID NO: 5156 - RNA, 19 nt, Influenza A virus
auucgcuuggagaagcagu

SEQ ID NO: 5157 - RNA, 19 nt, Influenza A virus
gugaugccccauuccuuga

SEQ ID NO: 5158 - RNA, 19 nt, Influenza A virus
gauucgcuuggagaagcag

SEQ ID NO: 5159 - RNA, 19 nt, Influenza A virus
uuggagaagcaguaaugag

SEQ ID NO: 5160 - RNA, 19 nt, Influenza A virus
cuuggagaagcaguaauga

SEQ ID NO: 5161 - RNA, 19 nt, Influenza A virus
gaagagauaagauggcuga

SEQ ID NO: 5162 - RNA, 19 nt, Influenza A virus
aagagauaagauggcugau

SEQ ID NO: 5163 - RNA, 19 nt, Influenza A virus
agauaagauggcugauuga

SEQ ID NO: 5164 - RNA, 19 nt, Influenza A virus
gauaagauggcugauugaa

SEQ ID NO: 5165 - RNA, 19 nt, Influenza A virus
guugaaagcgaauuucagu

SEQ ID NO: 5166 - RNA, 19 nt, Influenza A virus
gcuuggagaagcaguaaug

SEQ ID NO: 5167 - RNA, 19 nt, Influenza A virus
uggagaagcaguaaugaga

SEQ ID NO: 5168 - RNA, 19 nt, Influenza A virus
gagauaagauggcugauug

SEQ ID NO: 5169 - RNA, 19 nt, Influenza A virus
uucgcuuggagaagcagua

SEQ ID NO: 5170 - RNA, 19 nt, Influenza A virus
agagauaagauggcugauu

SEQ ID NO: 5171 - RNA, 19 nt, Influenza A virus
ucgcuuggagaagcaguaa

SEQ ID NO: 5172 - RNA, 19 nt, Influenza A virus
cgcuuggagaagcaguaau

SEQ ID NO: 5173 - RNA, 19 nt, Influenza A virus
cauguugaaagcgaauuuc

SEQ ID NO: 5174 - RNA, 19 nt, Influenza A virus
ucauguugaaagcgaauuu

SEQ ID NO: 5175 - RNA, 19 nt, Influenza A virus
uguugaaagcgaauuucag

SEQ ID NO: 5176 - RNA, 19 nt, Influenza A virus
uaacugacaugacuauuga

SEQ ID NO: 5177 - RNA, 19 nt, Influenza A virus
auguugaaagcgaauuuca

SEQ ID NO: 5178 - RNA, 19 nt, Influenza A virus
caaaacagaaacggaaaau

SEQ ID NO: 5179 - RNA, 19 nt, Influenza A virus
aaaacagaaacggaaaaug

SEQ ID NO: 5180 - RNA, 19 nt, Influenza A virus
aaacagaaacggaaaaugg

SEQ ID NO: 5181 - RNA, 19 nt, Influenza A virus
uccaaaacagaaacggaaa

SEQ ID NO: 5182 - RNA, 19 nt, Influenza A virus
cuccaaaacagaaacggaa

SEQ ID NO: 5183 - RNA, 19 nt, Influenza A virus
aucauguugaaagcgaauu

SEQ ID NO: 5184 - RNA, 19 nt, Influenza A virus
caucauguugaaagcgaau

SEQ ID NO: 5185 - RNA, 19 nt, Influenza A virus
augccccauuccuugaucg

SEQ ID NO: 5186 - RNA, 19 nt, Influenza A virus
gaugccccauuccuugauc

SEQ ID NO: 5187 - RNA, 19 nt, Influenza A virus
ggcgaaaucucaccauugc

SEQ ID NO: 5188 - RNA, 19 nt, Influenza A virus
uuguuggcgaaaucucacc

SEQ ID NO: 5189 - RNA, 19 nt, Influenza A virus
uuggcgaaaucucaccauu

SEQ ID NO: 5190 - RNA, 19 nt, Influenza A virus
agaaacggaaaauggcgag

SEQ ID NO: 5191 - RNA, 19 nt, Influenza A virus
uguuggcgaaaucucacca

SEQ ID NO: 5192 - RNA, 19 nt, Influenza A virus
ugauugaagaagugagaca

SEQ ID NO: 5193 - RNA, 19 nt, Influenza A virus
gaaacggaaaauggcgaga

SEQ ID NO: 5194 - RNA, 19 nt, Influenza A virus
uggcgaaaucucaccauug

SEQ ID NO: 5195 - RNA, 19 nt, Influenza A virus
ccaaaacagaaacggaaaa

SEQ ID NO: 5196 - RNA, 19 nt, Influenza A virus
auuguuggcgaaaucucac

SEQ ID NO: 5197 - RNA, 19 nt, Influenza A virus
aauuguuggcgaaaucuca

SEQ ID NO: 5198 - RNA, 19 nt, Influenza A virus
ugacuauugaggaauuguc

SEQ ID NO: 5199 - RNA, 19 nt, Influenza A virus
guuggcgaaaucucaccau

SEQ ID NO: 5200 - RNA, 19 nt, Influenza A virus
cuauugaggaauugucaag

SEQ ID NO: 5201 - RNA, 19 nt, Influenza A virus
acuauugaggaauugucaa

SEQ ID NO: 5202 - RNA, 19 nt, Influenza A virus
cagaaacggaaaauggcga

SEQ ID NO: 5203 - RNA, 19 nt, Influenza A virus
gacuauugaggaauuguca

SEQ ID NO: 5204 - RNA, 19 nt, Influenza A virus
acaucauguugaaagcgaa

SEQ ID NO: 5205 - RNA, 19 nt, Influenza A virus
ccccauuccuugaucggcu

SEQ ID NO: 5206 - RNA, 19 nt, Influenza A virus
acggaaaauggcgagaaca

SEQ ID NO: 5207 - RNA, 19 nt, Influenza A virus
ugccccauuccuugaucgg

SEQ ID NO: 5208 - RNA, 19 nt, Influenza A virus
aacggaaaauggcgagaac

SEQ ID NO: 5209 - RNA, 19 nt, Influenza A virus
gccccauuccuugaucggc

SEQ ID NO: 5210 - RNA, 19 nt, Influenza A virus
augacuauugaggaauugu

SEQ ID NO: 5211 - RNA, 19 nt, Influenza A virus
aaaucucaccauugccuuc

SEQ ID NO: 5212 - RNA, 19 nt, Influenza A virus
aaacggaaaauggcgagaa

SEQ ID NO: 5213 - RNA, 19 nt, Influenza A virus
gaaaucucaccauugccuu

SEQ ID NO: 5214 - RNA, 19 nt, Influenza A virus
cgaaaucucaccauugccu

SEQ ID NO: 5215 - RNA, 19 nt, Influenza A virus
aacaucauguugaaagcga

SEQ ID NO: 5216 - RNA, 19 nt, Influenza A virus
gcaauuguuggcgaaaucu

SEQ ID NO: 5217 - RNA, 19 nt, Influenza A virus
caauuguuggcgaaaucuc

SEQ ID NO: 5218 - RNA, 19 nt, Influenza A virus
gcgaaaucucaccauugcc

SEQ ID NO: 5219 - RNA, 19 nt, Influenza A virus
cccauuccuugaucggcuu

SEQ ID NO: 5220 - RNA, 19 nt, Influenza A virus
auugaagaagugagacaca

SEQ ID NO: 5221 - RNA, 19 nt, Influenza A virus
aaucucaccauugccuucu

SEQ ID NO: 5222 - RNA, 19 nt, Influenza A virus
aacagaaacggaaaauggc

SEQ ID NO: 5223 - RNA, 19 nt, Influenza A virus
ugaugccccauuccuugau

SEQ ID NO: 5224 - RNA, 19 nt, Influenza A virus
gcugauugaagaagugaga

SEQ ID NO: 5225 - RNA, 19 nt, Influenza A virus
cugauugaagaagugagac

SEQ ID NO: 5226 - RNA, 19 nt, Influenza A virus
uucuuuuccaggacauacu

SEQ ID NO: 5227 - RNA, 19 nt, Influenza A virus
acuccaaaacagaaacgga

SEQ ID NO: 5228 - RNA, 19 nt, Influenza A virus
ucccuaaggggaagaggca

SEQ ID NO: 5229 - RNA, 19 nt, Influenza A virus
agcaauuguuggcgaaauc

SEQ ID NO: 5230 - RNA, 19 nt, Influenza A virus
ucuuuuccaggacauacua

SEQ ID NO: 5231 - RNA, 19 nt, Influenza A virus
gauugaagaagugagacac

SEQ ID NO: 5232 - RNA, 19 nt, Influenza A virus
auuccaacacugugucaag

SEQ ID NO: 5233 - RNA, 19 nt, Influenza A virus
cuucuuuuccaggacauac

SEQ ID NO: 5234 - RNA, 19 nt, Influenza A virus
accauugccuucuuuucca

SEQ ID NO: 5235 - RNA, 19 nt, Influenza A virus
ccauugccuucuuuuccag

SEQ ID NO: 5236 - RNA, 19 nt, Influenza A virus
cauugccuucuuuuccagg

SEQ ID NO: 5237 - RNA, 19 nt, Influenza A virus
ccuucuuuuccaggacaua

SEQ ID NO: 5238 - RNA, 19 nt, Influenza A virus
gccuucuuuuccaggacau

SEQ ID NO: 5239 - RNA, 19 nt, Influenza A virus
ugccuucuuuuccaggaca

SEQ ID NO: 5240 - RNA, 19 nt, Influenza A virus
caccauugccuucuuuucc

SEQ ID NO: 5241 - RNA, 19 nt, Influenza A virus
uugccuucuuuuccaggac

SEQ ID NO: 5242 - RNA, 19 nt, Influenza A virus
uggauuccaacacuguguc

SEQ ID NO: 5243 - RNA, 19 nt, Influenza A virus
auggauuccaacacugugu

SEQ ID NO: 5244 - RNA, 19 nt, Influenza A virus
ucaccauugccuucuuuuc

SEQ ID NO: 5245 - RNA, 19 nt, Influenza A virus
ggauuccaacacuguguca

SEQ ID NO: 5246 - RNA, 19 nt, Influenza A virus
auugccuucuuuuccagga

SEQ ID NO: 5247 - RNA, 19 nt, Influenza A virus
gauuccaacacugugucaa

SEQ ID NO: 5248 - RNA, 19 nt, Influenza A virus
uugaagaagugagacacag

SEQ ID NO: 5249 - RNA, 19 nt, Influenza A virus
uugaaguggaacaggagau

SEQ ID NO: 5250 - RNA, 19 nt, Influenza A virus
uuugaaguggaacaggaga

SEQ ID NO: 5251 - RNA, 19 nt, Influenza A virus
ugaagaagugagacacaga

SEQ ID NO: 5252 - RNA, 19 nt, Influenza A virus
cugacaugacuauugagga

SEQ ID NO: 5253 - RNA, 19 nt, Influenza A virus
ugacaugacuauugaggaa

SEQ ID NO: 5254 - RNA, 19 nt, Influenza A virus
caaauaacauucaugcaag

SEQ ID NO: 5255 - RNA, 19 nt, Influenza A virus
aaauaacauucaugcaagc

SEQ ID NO: 5256 - RNA, 19 nt, Influenza A virus
acugacaugacuauugagg

SEQ ID NO: 5257 - RNA, 19 nt, Influenza A virus
cuuuuccaggacauacuau

SEQ ID NO: 5258 - RNA, 19 nt, Influenza A virus
uuuuccaggacauacuauu

SEQ ID NO: 5259 - RNA, 19 nt, Influenza A virus
uuuccaggacauacuauug

SEQ ID NO: 5260 - RNA, 19 nt, Influenza A virus
aaacaaguuguagaccaag

SEQ ID NO: 5261 - RNA, 19 nt, Influenza A virus
acaaguuguagaccaagaa

SEQ ID NO: 5262 - RNA, 19 nt, Influenza A virus
aaguuguagaccaagaacu

SEQ ID NO: 5263 - RNA, 19 nt, Influenza A virus
aacaaguuguagaccaaga

SEQ ID NO: 5264 - RNA, 19 nt, Influenza A virus
gaaucugaugaggcacuua

SEQ ID NO: 5265 - RNA, 19 nt, Influenza A virus
agaaucugaugaggcacuu

SEQ ID NO: 5266 - RNA, 19 nt, Influenza A virus
aacugacaugacuauugag

SEQ ID NO: 5267 - RNA, 19 nt, Influenza A virus
aaucugaugaggcacuuaa

SEQ ID NO: 5268 - RNA, 19 nt, Influenza A virus
ucugaugaggcacuuaaaa

SEQ ID NO: 5269 - RNA, 19 nt, Influenza A virus
ugaugaggcacuuaaaaug

SEQ ID NO: 5270 - RNA, 19 nt, Influenza A virus
cugaugaggcacuuaaaau

SEQ ID NO: 5271 - RNA, 19 nt, Influenza A virus
caaguuguagaccaagaac

SEQ ID NO: 5272 - RNA, 19 nt, Influenza A virus
ccacccauguuggaaagca

SEQ ID NO: 5273 - RNA, 19 nt, Influenza A virus
aucugaugaggcacuuaaa

SEQ ID NO: 5274 - RNA, 19 nt, Influenza A virus
agccacccauguuggaaag

SEQ ID NO: 5275 - RNA, 19 nt, Influenza A virus
gccacccauguuggaaagc

SEQ ID NO: 5276 - RNA, 19 nt, Influenza A virus
cagccacccauguuggaaa

SEQ ID NO: 5277 - RNA, 19 nt, Influenza A virus
gaaguggaacaggagauaa

SEQ ID NO: 5278 - RNA, 19 nt, Influenza A virus
aaguggaacaggagauaag

SEQ ID NO: 5279 - RNA, 19 nt, Influenza A virus
ugaaguggaacaggagaua

SEQ ID NO: 5280 - RNA, 19 nt, Influenza A virus
aggagauaagaacuuucuc

SEQ ID NO: 5281 - RNA, 19 nt, Influenza A virus
gaacaggagauaagaacuu

SEQ ID NO: 5282 - RNA, 19 nt, Influenza A virus
caggagauaagaacuuucu

SEQ ID NO: 5283 - RNA, 19 nt, Influenza A virus
acaggagauaagaacuuuc

SEQ ID NO: 5284 - RNA, 19 nt, Influenza A virus
aacaggagauaagaacuuu

SEQ ID NO: 5285 - RNA, 19 nt, Influenza A virus
guggaacaggagauaagaa

SEQ ID NO: 5286 - RNA, 19 nt, Influenza A virus
uggaacaggagauaagaac

SEQ ID NO: 5287 - RNA, 19 nt, Influenza A virus
ggaacaggagauaagaacu

SEQ ID NO: 5288 - RNA, 19 nt, Influenza A virus
ggagaagcaguaaugagaa

SEQ ID NO: 5289 - RNA, 19 nt, Influenza A virus
gucccuaaggggaagaggc

SEQ ID NO: 5290 - RNA, 19 nt, Influenza A virus
acuuacuccaaaacagaaa

SEQ ID NO: 5291 - RNA, 19 nt, Influenza A virus
gagaagcaguaaugagaau

SEQ ID NO: 5292 - RNA, 19 nt, Influenza A virus
ccaacacugugucaaguuu

SEQ ID NO: 5293 - RNA, 19 nt, Influenza A virus
agaagcaguaaugagaaug

SEQ ID NO: 5294 - RNA, 19 nt, Influenza A virus
aguggaacaggagauaaga

SEQ ID NO: 5295 - RNA, 19 nt, Influenza A virus
cuuacuccaaaacagaaac

SEQ ID NO: 5296 - RNA, 19 nt, Influenza A virus
cucaccauugccuucuuuu

SEQ ID NO: 5297 - RNA, 19 nt, Influenza A virus
ucucaccauugccuucuuu

SEQ ID NO: 5298 - RNA, 19 nt, Influenza A virus
aucucaccauugccuucuu

SEQ ID NO: 5299 - RNA, 19 nt, Influenza A virus
uccaacacugugucaaguu

SEQ ID NO: 5300 - RNA, 19 nt, Influenza A virus
uacuccaaaacagaaacgg

SEQ ID NO: 5301 - RNA, 19 nt, Influenza A virus
uuacuccaaaacagaaacg

SEQ ID NO: 5302 - RNA, 19 nt, Influenza A virus
uuccaacacugugucaagu

SEQ ID NO: 5303 - RNA, 19 nt, Influenza A virus
aucagaauggaccaggcaa

SEQ ID NO: 5304 - RNA, 19 nt, Influenza A virus
uaaugagaaugggggaccu

SEQ ID NO: 5305 - RNA, 19 nt, Influenza A virus
uaauggauuccaacacugu

SEQ ID NO: 5306 - RNA, 19 nt, Influenza A virus
caaguuuccagguagauug

SEQ ID NO: 5307 - RNA, 19 nt, Influenza A virus
cauaauggauuccaacacu

SEQ ID NO: 5308 - RNA, 19 nt, Influenza A virus
caguaaugagaauggggga

SEQ ID NO: 5309 - RNA, 19 nt, Influenza A virus
gcaguaaugagaauggggg

SEQ ID NO: 5310 - RNA, 19 nt, Influenza A virus
ucaaguuuccagguagauu

SEQ ID NO: 5311 - RNA, 19 nt, Influenza A virus
aauggauuccaacacugug

SEQ ID NO: 5312 - RNA, 19 nt, Influenza A virus
acauaauggauuccaacac

SEQ ID NO: 5313 - RNA, 19 nt, Influenza A virus
aguaaugagaaugggggac

SEQ ID NO: 5314 - RNA, 19 nt, Influenza A virus
aaugagaaugggggaccuc

SEQ ID NO: 5315 - RNA, 19 nt, Influenza A virus
guaaugagaaugggggacc

SEQ ID NO: 5316 - RNA, 19 nt, Influenza A virus
agcaguaaugagaaugggg

SEQ ID NO: 5317 - RNA, 19 nt, Influenza A virus
ugucaaguuuccagguaga

SEQ ID NO: 5318 - RNA, 19 nt, Influenza A virus
ccacaccugcuucgcgaua

SEQ ID NO: 5319 - RNA, 19 nt, Influenza A virus
uccacaccugcuucgcgau

SEQ ID NO: 5320 - RNA, 19 nt, Influenza A virus
acaugacuauugaggaauu

SEQ ID NO: 5321 - RNA, 19 nt, Influenza A virus
cuccacaccugcuucgcga

SEQ ID NO: 5322 - RNA, 19 nt, Influenza A virus
cacaccugcuucgcgauac

SEQ ID NO: 5323 - RNA, 19 nt, Influenza A virus
ugugucaaguuuccaggua

SEQ ID NO: 5324 - RNA, 19 nt, Influenza A virus
gacaugacuauugaggaau

SEQ ID NO: 5325 - RNA, 19 nt, Influenza A virus
gugucaaguuuccagguag

SEQ ID NO: 5326 - RNA, 19 nt, Influenza A virus
acugugucaaguuuccagg

SEQ ID NO: 5327 - RNA, 19 nt, Influenza A virus
cugugucaaguuuccaggu

SEQ ID NO: 5328 - RNA, 19 nt, Influenza A virus
auaauggauuccaacacug

SEQ ID NO: 5329 - RNA, 19 nt, Influenza A virus
gucaaguuuccagguagau

SEQ ID NO: 5330 - RNA, 19 nt, Influenza A virus
caccugcuucgcgauacau

SEQ ID NO: 5331 - RNA, 19 nt, Influenza A virus
acaccugcuucgcgauaca

SEQ ID NO: 5332 - RNA, 19 nt, Influenza A virus
caucagaauggaccaggca

SEQ ID NO: 5333 - RNA, 19 nt, Influenza A virus
ggcuucgccgagaucagag

SEQ ID NO: 5334 - RNA, 19 nt, Influenza A virus
gcaucagaauggaccaggc

SEQ ID NO: 5335 - RNA, 19 nt, Influenza A virus
gcuucgcgauacauaacug

SEQ ID NO: 5336 - RNA, 19 nt, Influenza A virus
cacugugucaaguuuccag

SEQ ID NO: 5337 - RNA, 19 nt, Influenza A virus
acacugugucaaguuucca

SEQ ID NO: 5338 - RNA, 19 nt, Influenza A virus
aacacugugucaaguuucc

SEQ ID NO: 5339 - RNA, 19 nt, Influenza A virus
cuucgcgauacauaacuga

SEQ ID NO: 5340 - RNA, 19 nt, Influenza A virus
uggaccaggcaaucaugga

SEQ ID NO: 5341 - RNA, 19 nt, Influenza A virus
cggaaaauggcgagaacag

SEQ ID NO: 5342 - RNA, 19 nt, Influenza A virus
aauggcgagaacagcuagg

SEQ ID NO: 5343 - RNA, 19 nt, Influenza A virus
ccugcuucgcgauacauaa

SEQ ID NO: 5344 - RNA, 19 nt, Influenza A virus
ugcaucagaauggaccagg

SEQ ID NO: 5345 - RNA, 19 nt, Influenza A virus
ugcuucgcgauacauaacu

SEQ ID NO: 5346 - RNA, 19 nt, Influenza A virus
cugcuucgcgauacauaac

SEQ ID NO: 5347 - RNA, 19 nt, Influenza A virus
uggcgagaacagcuagguc

SEQ ID NO: 5348 - RNA, 19 nt, Influenza A virus
accugcuucgcgauacaua

SEQ ID NO: 5349 - RNA, 19 nt, Influenza A virus
auggcgagaacagcuaggu

SEQ ID NO: 5350 - RNA, 19 nt, Influenza A virus
aaauggcgagaacagcuag

SEQ ID NO: 5351 - RNA, 19 nt, Influenza A virus
uauugaggaauugucaaga

SEQ ID NO: 5352 - RNA, 19 nt, Influenza A virus
auggaccaggcaaucaugg

SEQ ID NO: 5353 - RNA, 19 nt, Influenza A virus
ucagaauggaccaggcaau

SEQ ID NO: 5354 - RNA, 19 nt, Influenza A virus
gcgagaacagcuaggucaa

SEQ ID NO: 5355 - RNA, 19 nt, Influenza A virus
gagaacagcuaggucaaaa

SEQ ID NO: 5356 - RNA, 19 nt, Influenza A virus
cgagaacagcuaggucaaa

SEQ ID NO: 5357 - RNA, 19 nt, Influenza A virus
ggcgagaacagcuagguca

SEQ ID NO: 5358 - RNA, 19 nt, Influenza A virus
aauggaccaggcaaucaug

SEQ ID NO: 5359 - RNA, 19 nt, Influenza A virus
aagcagccacccauguugg

SEQ ID NO: 5360 - RNA, 19 nt, Influenza A virus
gaauggaccaggcaaucau

SEQ ID NO: 5361 - RNA, 19 nt, Influenza A virus
ucaagaaacugguucaugc

SEQ ID NO: 5362 - RNA, 19 nt, Influenza A virus
gcagccacccauguuggaa

SEQ ID NO: 5363 - RNA, 19 nt, Influenza A virus
agcagccacccauguugga

SEQ ID NO: 5364 - RNA, 19 nt, Influenza A virus
caagaaacugguucaugcu

SEQ ID NO: 5365 - RNA, 19 nt, Influenza A virus
gaccuccacuuacuccaaa

SEQ ID NO: 5366 - RNA, 19 nt, Influenza A virus
aacugguucaugcuaaugc

SEQ ID NO: 5367 - RNA, 19 nt, Influenza A virus
agaauggaccaggcaauca

SEQ ID NO: 5368 - RNA, 19 nt, Influenza A virus
cacuuacuccaaaacagaa

SEQ ID NO: 5369 - RNA, 19 nt, Influenza A virus
uccacuuacuccaaaacag

SEQ ID NO: 5370 - RNA, 19 nt, Influenza A virus
cagaauggaccaggcaauc

SEQ ID NO: 5371 - RNA, 19 nt, Influenza A virus
ccacuuacuccaaaacaga

SEQ ID NO: 5372 - RNA, 19 nt, Influenza A virus
gaaacugguucaugcuaau

SEQ ID NO: 5373 - RNA, 19 nt, Influenza A virus
agaaacugguucaugcuaa

SEQ ID NO: 5374 - RNA, 19 nt, Influenza A virus
aaacugguucaugcuaaug

SEQ ID NO: 5375 - RNA, 19 nt, Influenza A virus
cuccacuuacuccaaaaca

SEQ ID NO: 5376 - RNA, 19 nt, Influenza A virus
caugacuauugaggaauug

SEQ ID NO: 5377 - RNA, 19 nt, Influenza A virus
aagaaacugguucaugcua

SEQ ID NO: 5378 - RNA, 19 nt, Influenza A virus
cagguagauugcuuucuuu

SEQ ID NO: 5379 - RNA, 19 nt, Influenza A virus
ccuccacuuacuccaaaac

SEQ ID NO: 5380 - RNA, 19 nt, Influenza A virus
accuccacuuacuccaaaa

SEQ ID NO: 5381 - RNA, 19 nt, Influenza A virus
agguagauugcuuucuuug

SEQ ID NO: 5382 - RNA, 19 nt, Influenza A virus
gguagauugcuuucuuugg

SEQ ID NO: 5383 - RNA, 19 nt, Influenza A virus
uagauugcuuucuuuggca

SEQ ID NO: 5384 - RNA, 19 nt, Influenza A virus
guagauugcuuucuuuggc

SEQ ID NO: 5385 - RNA, 19 nt, Influenza A virus
caacacugugucaaguuuc

SEQ ID NO: 5386 - RNA, 19 nt, Influenza A virus
agauugcuuucuuuggcau

SEQ ID NO: 5387 - RNA, 19 nt, Influenza A virus
aacagcuaggucaaaaguu

SEQ ID NO: 5388 - RNA, 19 nt, Influenza A virus
aaucuacagagauucgcuu

SEQ ID NO: 5389 - RNA, 19 nt, Influenza A virus
gaacagcuaggucaaaagu

SEQ ID NO: 5390 - RNA, 19 nt, Influenza A virus
aucuacagagauucgcuug

SEQ ID NO: 5391 - RNA, 19 nt, Influenza A virus
aguuuccagguagauugcu

SEQ ID NO: 5392 - RNA, 19 nt, Influenza A virus
guuuccagguagauugcuu

SEQ ID NO: 5393 - RNA, 19 nt, Influenza A virus
aaguuuccagguagauugc

SEQ ID NO: 5394 - RNA, 19 nt, Influenza A virus
agaacagcuaggucaaaag

SEQ ID NO: 5395 - RNA, 19 nt, Influenza A virus
ugggggaccuccacuuacu

SEQ ID NO: 5396 - RNA, 19 nt, Influenza A virus
augggggaccuccacuuac

SEQ ID NO: 5397 - RNA, 19 nt, Influenza A virus
aguucgagucucuaaaaau

SEQ ID NO: 5398 - RNA, 19 nt, Influenza A virus
ggggaccuccacuuacucc

SEQ ID NO: 5399 - RNA, 19 nt, Influenza A virus
caguucgagucucuaaaaa

SEQ ID NO: 5400 - RNA, 19 nt, Influenza A virus
gggaccuccacuuacucca

SEQ ID NO: 5401 - RNA, 19 nt, Influenza A virus
gggggaccuccacuuacuc

SEQ ID NO: 5402 - RNA, 19 nt, Influenza A virus
aaaacaucauguugaaagc

SEQ ID NO: 5403 - RNA, 19 nt, Influenza A virus
agucucuaaaaaucuacag

SEQ ID NO: 5404 - RNA, 19 nt, Influenza A virus
aaaucuacagagauucgcu

SEQ ID NO: 5405 - RNA, 19 nt, Influenza A virus
uggagaaaaacaucauguu

SEQ ID NO: 5406 - RNA, 19 nt, Influenza A virus
aaaaucuacagagauucgc

SEQ ID NO: 5407 - RNA, 19 nt, Influenza A virus
gucucuaaaaaucuacaga

SEQ ID NO: 5408 - RNA, 19 nt, Influenza A virus
aaaaacaucauguugaaag

SEQ ID NO: 5409 - RNA, 19 nt, Influenza A virus
ggaccaggcaaucauggag

SEQ ID NO: 5410 - RNA, 19 nt, Influenza A virus
cauggagaaaaacaucaug

SEQ ID NO: 5411 - RNA, 19 nt, Influenza A virus
ucuaaaaaucuacagagau

SEQ ID NO: 5412 - RNA, 19 nt, Influenza A virus
accaggcaaucauggagaa

SEQ ID NO: 5413 - RNA, 19 nt, Influenza A virus
cucuaaaaaucuacagaga

SEQ ID NO: 5414 - RNA, 19 nt, Influenza A virus
cgagucucuaaaaaucuac

SEQ ID NO: 5415 - RNA, 19 nt, Influenza A virus
cuguuugaaguggaacagg

SEQ ID NO: 5416 - RNA, 19 nt, Influenza A virus
agaaaaacaucauguugaa

SEQ ID NO: 5417 - RNA, 19 nt, Influenza A virus
cuaaaaaucuacagagauu

SEQ ID NO: 5418 - RNA, 19 nt, Influenza A virus
gagaaaaacaucauguuga

SEQ ID NO: 5419 - RNA, 19 nt, Influenza A virus
ugaggaauugucaagaaac

SEQ ID NO: 5420 - RNA, 19 nt, Influenza A virus
gaaaaacaucauguugaaa

SEQ ID NO: 5421 - RNA, 19 nt, Influenza A virus
auggagaaaaacaucaugu

SEQ ID NO: 5422 - RNA, 19 nt, Influenza A virus
uguuugaaguggaacagga

SEQ ID NO: 5423 - RNA, 19 nt, Influenza A virus
uucgagucucuaaaaaucu

SEQ ID NO: 5424 - RNA, 19 nt, Influenza A virus
ucgagucucuaaaaaucua

SEQ ID NO: 5425 - RNA, 19 nt, Influenza A virus
uugaggaauugucaagaaa

SEQ ID NO: 5426 - RNA, 19 nt, Influenza A virus
ggaauugucaagaaacugg

SEQ ID NO: 5427 - RNA, 19 nt, Influenza A virus
guucgagucucuaaaaauc

SEQ ID NO: 5428 - RNA, 19 nt, Influenza A virus
gaccaggcaaucauggaga

SEQ ID NO: 5429 - RNA, 19 nt, Influenza A virus
aggaauugucaagaaacug

SEQ ID NO: 5430 - RNA, 19 nt, Influenza A virus
gagucucuaaaaaucuaca

SEQ ID NO: 5431 - RNA, 19 nt, Influenza A virus
ucucuaaaaaucuacagag

SEQ ID NO: 5432 - RNA, 19 nt, Influenza A virus
ggagaaaaacaucauguug

SEQ ID NO: 5433 - RNA, 19 nt, Influenza A virus
gaggaauugucaagaaacu

SEQ ID NO: 5434 - RNA, 19 nt, Influenza A virus
aauugucaagaaacugguu

SEQ ID NO: 5435 - RNA, 19 nt, Influenza A virus
caaagacauaauggauucc

SEQ ID NO: 5436 - RNA, 19 nt, Influenza A virus
gaauugucaagaaacuggu

SEQ ID NO: 5437 - RNA, 19 nt, Influenza A virus
ugucaagaaacugguucau

SEQ ID NO: 5438 - RNA, 19 nt, Influenza A virus
ugagaaugggggaccucca

SEQ ID NO: 5439 - RNA, 19 nt, Influenza A virus
augagaaugggggaccucc

SEQ ID NO: 5440 - RNA, 19 nt, Influenza A virus
ugcuguuugaaguggaaca

SEQ ID NO: 5441 - RNA, 19 nt, Influenza A virus
gucaagaaacugguucaug

SEQ ID NO: 5442 - RNA, 19 nt, Influenza A virus
cugcuguuugaaguggaac

SEQ ID NO: 5443 - RNA, 19 nt, Influenza A virus
uuccagguagauugcuuuc

SEQ ID NO: 5444 - RNA, 19 nt, Influenza A virus
ggaccuccacuuacuccaa

SEQ ID NO: 5445 - RNA, 19 nt, Influenza A virus
ccagguagauugcuuucuu

SEQ ID NO: 5446 - RNA, 19 nt, Influenza A virus
auugaggaauugucaagaa

SEQ ID NO: 5447 - RNA, 19 nt, Influenza A virus
auugucaagaaacugguuc

SEQ ID NO: 5448 - RNA, 19 nt, Influenza A virus
uugucaagaaacugguuca

SEQ ID NO: 5449 - RNA, 19 nt, Influenza A virus
uaaaaaucuacagagauuc

SEQ ID NO: 5450 - RNA, 19 nt, Influenza A virus
uccagguagauugcuuucu

SEQ ID NO: 5451 - RNA, 19 nt, Influenza A virus
aguuuugagcaaauaacau

SEQ ID NO: 5452 - RNA, 19 nt, Influenza A virus
gcuguuugaaguggaacag

SEQ ID NO: 5453 - RNA, 19 nt, Influenza A virus
caggcaaucauggagaaaa

SEQ ID NO: 5454 - RNA, 19 nt, Influenza A virus
aauaguuuugagcaaauaa

SEQ ID NO: 5455 - RNA, 19 nt, Influenza A virus
uuuccagguagauugcuuu

SEQ ID NO: 5456 - RNA, 19 nt, Influenza A virus
agaaugggggaccuccacu

SEQ ID NO: 5457 - RNA, 19 nt, Influenza A virus
aaacaucauguugaaagcg

SEQ ID NO: 5458 - RNA, 19 nt, Influenza A virus
gagaaugggggaccuccac

SEQ ID NO: 5459 - RNA, 19 nt, Influenza A virus
guuuugagcaaauaacauu

SEQ ID NO: 5460 - RNA, 19 nt, Influenza A virus
aaaaaucuacagagauucg

SEQ ID NO: 5461 - RNA, 19 nt, Influenza A virus
uaguauuacuaagggcuuu

SEQ ID NO: 5462 - RNA, 19 nt, Influenza A virus
auaguuuugagcaaauaac

SEQ ID NO: 5463 - RNA, 19 nt, Influenza A virus
guauuacuaagggcuuuca

SEQ ID NO: 5464 - RNA, 19 nt, Influenza A virus
uaguuuugagcaaauaaca

SEQ ID NO: 5465 - RNA, 19 nt, Influenza A virus
aguauuacuaagggcuuuc

SEQ ID NO: 5466 - RNA, 19 nt, Influenza A virus
ccaggcaaucauggagaaa

SEQ ID NO: 5467 - RNA, 19 nt, Influenza A virus
aggcaaucauggagaaaaa

SEQ ID NO: 5468 - RNA, 19 nt, Influenza A virus
acucucggucuagacauca

SEQ ID NO: 5469 - RNA, 19 nt, Influenza A virus
gaaugggggaccuccacuu

SEQ ID NO: 5470 - RNA, 19 nt, Influenza A virus
caaucauggagaaaaacau

SEQ ID NO: 5471 - RNA, 19 nt, Influenza A virus
aaucauggagaaaaacauc

SEQ ID NO: 5472 - RNA, 19 nt, Influenza A virus
ggcaaucauggagaaaaac

SEQ ID NO: 5473 - RNA, 19 nt, Influenza A virus
gcaaucauggagaaaaaca

SEQ ID NO: 5474 - RNA, 19 nt, Influenza A virus
uuugcaucagaauggacca

SEQ ID NO: 5475 - RNA, 19 nt, Influenza A virus
uugcaucagaauggaccag

SEQ ID NO: 5476 - RNA, 19 nt, Influenza A virus
cucucggucuagacaucaa

SEQ ID NO: 5477 - RNA, 19 nt, Influenza A virus
ucucggucuagacaucaaa

SEQ ID NO: 5478 - RNA, 19 nt, Influenza A virus
aaugggggaccuccacuua

SEQ ID NO: 5479 - RNA, 19 nt, Influenza A virus
aucauggagaaaaacauca

SEQ ID NO: 5480 - RNA, 19 nt, Influenza A virus
cuuugcaucagaauggacc

SEQ ID NO: 5481 - RNA, 19 nt, Influenza A virus
ccgagaucagaggucccua

SEQ ID NO: 5482 - RNA, 19 nt, Influenza A virus
guuugaaguggaacaggag

SEQ ID NO: 5483 - RNA, 19 nt, Influenza A virus
cgagaucagaggucccuaa

SEQ ID NO: 5484 - RNA, 19 nt, Influenza A virus
gccagacagcgaccaaagg

SEQ ID NO: 5485 - RNA, 19 nt, Influenza A virus
gucagacagcgaccaaaag

SEQ ID NO: 5486 - RNA, 19 nt, Influenza A virus
gccagacgacgaucaaaag

SEQ ID NO: 5487 - RNA, 19 nt, Influenza A virus
agccagacagcgaccaaag

SEQ ID NO: 5488 - RNA, 19 nt, Influenza A virus
agucagacagcgaccaaaa

SEQ ID NO: 5489 - RNA, 19 nt, Influenza A virus
agccagacgacgaucaaaa

SEQ ID NO: 5490 - RNA, 19 nt, Influenza A virus
acagucagacagcgaccaa

SEQ ID NO: 5491 - RNA, 19 nt, Influenza A virus
auagccagacagcgaccaa

SEQ ID NO: 5492 - RNA, 19 nt, Influenza A virus
acagccagacgacgaucaa

SEQ ID NO: 5493 - RNA, 19 nt, Influenza A virus
gacagucagacagcgacca

SEQ ID NO: 5494 - RNA, 19 nt, Influenza A virus
gauagccagacagcgacca

SEQ ID NO: 5495 - RNA, 19 nt, Influenza A virus
gacagccagacgacgauca

SEQ ID NO: 5496 - RNA, 19 nt, Influenza A virus
cagacagcgaccaaaagga

SEQ ID NO: 5497 - RNA, 19 nt, Influenza A virus
cagacagcgaccaaaggaa

SEQ ID NO: 5498 - RNA, 19 nt, Influenza A virus
cagacagcgaccaaaagau

SEQ ID NO: 5499 - RNA, 19 nt, Influenza A virus
cagacgacgaucaaaagaa

SEQ ID NO: 5500 - RNA, 19 nt, Influenza A virus
cagucagacagcgaccaaa

SEQ ID NO: 5501 - RNA, 19 nt, Influenza A virus
uagccagacagcgaccaaa

SEQ ID NO: 5502 - RNA, 19 nt, Influenza A virus
cagccagacgacgaucaaa

SEQ ID NO: 5503 - RNA, 19 nt, Influenza A virus
agacagcgaccaaaaggau

SEQ ID NO: 5504 - RNA, 19 nt, Influenza A virus
agacagcgaccaaaggaau

SEQ ID NO: 5505 - RNA, 19 nt, Influenza A virus
agacagcgaccaaaagauu

SEQ ID NO: 5506 - RNA, 19 nt, Influenza A virus
agacgacgaucaaaagaau

SEQ ID NO: 5507 - RNA, 19 nt, Influenza A virus
ccagacagcgaccaaaagg

SEQ ID NO: 5508 - RNA, 19 nt, Influenza A virus
ccagacagcgaccaaagga

SEQ ID NO: 5509 - RNA, 19 nt, Influenza A virus
ucagacagcgaccaaaaga

SEQ ID NO: 5510 - RNA, 19 nt, Influenza A virus
ccagacgacgaucaaaaga

SEQ ID NO: 5511 - RNA, 19 nt, Influenza A virus
acagcgaccaaaaggauuc

SEQ ID NO: 5512 - RNA, 19 nt, Influenza A virus
acagcgaccaaaggaauuc

SEQ ID NO: 5513 - RNA, 19 nt, Influenza A virus
acagcgaccaaaagauuuc

SEQ ID NO: 5514 - RNA, 19 nt, Influenza A virus
acgacgaucaaaagaauuc

SEQ ID NO: 5515 - RNA, 19 nt, Influenza A virus
uacuuacugacagucagac

SEQ ID NO: 5516 - RNA, 19 nt, Influenza A virus
uacuuacugauagccagac

SEQ ID NO: 5517 - RNA, 19 nt, Influenza A virus
ugcuuacugacagccagac

SEQ ID NO: 5518 - RNA, 19 nt, Influenza A virus
uacuuaccgacagccagac

SEQ ID NO: 5519 - RNA, 19 nt, Influenza A virus
cagcgaccaaaaggauucg

SEQ ID NO: 5520 - RNA, 19 nt, Influenza A virus
cagcgaccaaaggaauucg

SEQ ID NO: 5521 - RNA, 19 nt, Influenza A virus
cagcgaccaaaagauuucg

SEQ ID NO: 5522 - RNA, 19 nt, Influenza A virus
cgacgaucaaaagaauucg

SEQ ID NO: 5523 - RNA, 19 nt, Influenza A virus
acuuacugacagucagaca

SEQ ID NO: 5524 - RNA, 19 nt, Influenza A virus
acuuacugauagccagaca

SEQ ID NO: 5525 - RNA, 19 nt, Influenza A virus
gcuuacugacagccagacg

SEQ ID NO: 5526 - RNA, 19 nt, Influenza A virus
acuuaccgacagccagaca

SEQ ID NO: 5527 - RNA, 19 nt, Influenza A virus
cauacuuacugacagucag

SEQ ID NO: 5528 - RNA, 19 nt, Influenza A virus
cauacuuacugauagccag

SEQ ID NO: 5529 - RNA, 19 nt, Influenza A virus
caugcuuacugacagccag

SEQ ID NO: 5530 - RNA, 19 nt, Influenza A virus
cauacuuaccgacagccag

SEQ ID NO: 5531 - RNA, 19 nt, Influenza A virus
cuuacugacagucagacag

SEQ ID NO: 5532 - RNA, 19 nt, Influenza A virus
cuuacugauagccagacag

SEQ ID NO: 5533 - RNA, 19 nt, Influenza A virus
cuuaccgacagccagacag

SEQ ID NO: 5534 - RNA, 19 nt, Influenza A virus
cuuacugacagccagacga

SEQ ID NO: 5535 - RNA, 19 nt, Influenza A virus
gacagcgaccaaaaggauu

SEQ ID NO: 5536 - RNA, 19 nt, Influenza A virus
gacagcgaccaaaggaauu

SEQ ID NO: 5537 - RNA, 19 nt, Influenza A virus
gacagcgaccaaaagauuu

SEQ ID NO: 5538 - RNA, 19 nt, Influenza A virus
gacgacgaucaaaagaauu

SEQ ID NO: 5539 - RNA, 19 nt, Influenza A virus
auacuuacugacagucaga

SEQ ID NO: 5540 - RNA, 19 nt, Influenza A virus
auacuuacugauagccaga

SEQ ID NO: 5541 - RNA, 19 nt, Influenza A virus
augcuuacugacagccaga

SEQ ID NO: 5542 - RNA, 19 nt, Influenza A virus
auacuuaccgacagccaga

SEQ ID NO: 5543 - RNA, 19 nt, Influenza A virus
acugacagucagacagcga

SEQ ID NO: 5544 - RNA, 19 nt, Influenza A virus
acugauagccagacagcga

SEQ ID NO: 5545 - RNA, 19 nt, Influenza A virus
accgacagccagacagcga

SEQ ID NO: 5546 - RNA, 19 nt, Influenza A virus
acugacagccagacgacga

SEQ ID NO: 5547 - RNA, 19 nt, Influenza A virus
gcauacuuacugacaguca

SEQ ID NO: 5548 - RNA, 19 nt, Influenza A virus
gcauacuuacugauagcca

SEQ ID NO: 5549 - RNA, 19 nt, Influenza A virus
gcaugcuuacugacagcca

SEQ ID NO: 5550 - RNA, 19 nt, Influenza A virus
acauacuuacugacagcca

SEQ ID NO: 5551 - RNA, 19 nt, Influenza A virus
gcauacuuaccgacagcca

SEQ ID NO: 5552 - RNA, 19 nt, Influenza A virus
agcauacuuacugacaguc

SEQ ID NO: 5553 - RNA, 19 nt, Influenza A virus
agcauacuuacugauagcc

SEQ ID NO: 5554 - RNA, 19 nt, Influenza A virus
agcaugcuuacugacagcc

SEQ ID NO: 5555 - RNA, 19 nt, Influenza A virus
aacauacuuacugacagcc

SEQ ID NO: 5556 - RNA, 19 nt, Influenza A virus
agcauacuuaccgacagcc

SEQ ID NO: 5557 - RNA, 19 nt, Influenza A virus
ugacagucagacagcgacc

SEQ ID NO: 5558 - RNA, 19 nt, Influenza A virus
ugauagccagacagcgacc

SEQ ID NO: 5559 - RNA, 19 nt, Influenza A virus
cgacagccagacagcgacc

SEQ ID NO: 5560 - RNA, 19 nt, Influenza A virus
ugacagccagacgacgauc

SEQ ID NO: 5561 - RNA, 19 nt, Influenza A virus
uacugacagucagacagcg

SEQ ID NO: 5562 - RNA, 19 nt, Influenza A virus
uacugauagccagacagcg

SEQ ID NO: 5563 - RNA, 19 nt, Influenza A virus
uaccgacagccagacagcg

SEQ ID NO: 5564 - RNA, 19 nt, Influenza A virus
uacugacagccagacgacg

SEQ ID NO: 5565 - RNA, 19 nt, Influenza A virus
uuacugacagucagacagc

SEQ ID NO: 5566 - RNA, 19 nt, Influenza A virus
uuacugauagccagacagc

SEQ ID NO: 5567 - RNA, 19 nt, Influenza A virus
uuaccgacagccagacagc

SEQ ID NO: 5568 - RNA, 19 nt, Influenza A virus
uuacugacagccagacgac

SEQ ID NO: 5569 - RNA, 19 nt, Influenza A virus
cugacagucagacagcgac

SEQ ID NO: 5570 - RNA, 19 nt, Influenza A virus
cugauagccagacagcgac

SEQ ID NO: 5571 - RNA, 19 nt, Influenza A virus
ccgacagccagacagcgac

SEQ ID NO: 5572 - RNA, 19 nt, Influenza A virus
cugacagccagacgacgau

SEQ ID NO: 5573 - RNA, 19 nt, Influenza A virus
acucuagcaugcuuacuga

SEQ ID NO: 5574 - RNA, 19 nt, Influenza A virus
acuuuagcauacuuacuga

SEQ ID NO: 5575 - RNA, 19 nt, Influenza A virus
acuauagcauacuuacuga

SEQ ID NO: 5576 - RNA, 19 nt, Influenza A virus
acuccagcauacuuacuga

SEQ ID NO: 5577 - RNA, 19 nt, Influenza A virus
acucuaacauacuuacuga

SEQ ID NO: 5578 - RNA, 19 nt, Influenza A virus
acucuagcauacuuaccga

SEQ ID NO: 5579 - RNA, 19 nt, Influenza A virus
uagcauacuuacugacagu

SEQ ID NO: 5580 - RNA, 19 nt, Influenza A virus
uagcauacuuacugauagc

SEQ ID NO: 5581 - RNA, 19 nt, Influenza A virus
uagcaugcuuacugacagc

SEQ ID NO: 5582 - RNA, 19 nt, Influenza A virus
cagcauacuuacugacagc

SEQ ID NO: 5583 - RNA, 19 nt, Influenza A virus
uaacauacuuacugacagc

SEQ ID NO: 5584 - RNA, 19 nt, Influenza A virus
uagcauacuuaccgacagc

SEQ ID NO: 5585 - RNA, 19 nt, Influenza A virus
cucuagcauacuuacugau

SEQ ID NO: 5586 - RNA, 19 nt, Influenza A virus
cucuagcaugcuuacugac

SEQ ID NO: 5587 - RNA, 19 nt, Influenza A virus
cuuuagcauacuuacugac

SEQ ID NO: 5588 - RNA, 19 nt, Influenza A virus
cuauagcauacuuacugac

SEQ ID NO: 5589 - RNA, 19 nt, Influenza A virus
cuccagcauacuuacugac

SEQ ID NO: 5590 - RNA, 19 nt, Influenza A virus
cucuaacauacuuacugac

SEQ ID NO: 5591 - RNA, 19 nt, Influenza A virus
cucuagcauacuuaccgac

SEQ ID NO: 5592 - RNA, 19 nt, Influenza A virus
cuagcauacuuacugauag

SEQ ID NO: 5593 - RNA, 19 nt, Influenza A virus
cuagcaugcuuacugacag

SEQ ID NO: 5594 - RNA, 19 nt, Influenza A virus
uuagcauacuuacugacag

SEQ ID NO: 5595 - RNA, 19 nt, Influenza A virus
auagcauacuuacugacag

SEQ ID NO: 5596 - RNA, 19 nt, Influenza A virus
ccagcauacuuacugacag

SEQ ID NO: 5597 - RNA, 19 nt, Influenza A virus
cuaacauacuuacugacag

SEQ ID NO: 5598 - RNA, 19 nt, Influenza A virus
cuagcauacuuaccgacag

SEQ ID NO: 5599 - RNA, 19 nt, Influenza A virus
ucuagcauacuuacugaua

SEQ ID NO: 5600 - RNA, 19 nt, Influenza A virus
ucuagcaugcuuacugaca

SEQ ID NO: 5601 - RNA, 19 nt, Influenza A virus
uuuagcauacuuacugaca

SEQ ID NO: 5602 - RNA, 19 nt, Influenza A virus
uauagcauacuuacugaca

SEQ ID NO: 5603 - RNA, 19 nt, Influenza A virus
uccagcauacuuacugaca

SEQ ID NO: 5604 - RNA, 19 nt, Influenza A virus
ucuaacauacuuacugaca

SEQ ID NO: 5605 - RNA, 19 nt, Influenza A virus
ucuagcauacuuaccgaca

SEQ ID NO: 5606 - RNA, 19 nt, Influenza A virus
caaaaggauucggauggcc

SEQ ID NO: 5607 - RNA, 19 nt, Influenza A virus
caaaggaauucggauggcc

SEQ ID NO: 5608 - RNA, 19 nt, Influenza A virus
caaaagaauucgaauggcc

SEQ ID NO: 5609 - RNA, 19 nt, Influenza A virus
caaaagauuucggauggcc

SEQ ID NO: 5610 - RNA, 19 nt, Influenza A virus
caaaaggauucgaauggcc

SEQ ID NO: 5611 - RNA, 19 nt, Influenza A virus
aaaaggauucggauggcca

SEQ ID NO: 5612 - RNA, 19 nt, Influenza A virus
aaaggaauucggauggcca

SEQ ID NO: 5613 - RNA, 19 nt, Influenza A virus
aaaagaauucgaauggcca

SEQ ID NO: 5614 - RNA, 19 nt, Influenza A virus
aaaagauuucggauggcca

SEQ ID NO: 5615 - RNA, 19 nt, Influenza A virus
aaaaggauucgaauggcca

SEQ ID NO: 5616 - RNA, 19 nt, Influenza A virus
gaccaaaaggauucggaug

SEQ ID NO: 5617 - RNA, 19 nt, Influenza A virus
gaccaaaggaauucggaug

SEQ ID NO: 5618 - RNA, 19 nt, Influenza A virus
gaucaaaagaauucggaug

SEQ ID NO: 5619 - RNA, 19 nt, Influenza A virus
gaccaaaagaauucgaaug

SEQ ID NO: 5620 - RNA, 19 nt, Influenza A virus
gaccaaaagauuucggaug

SEQ ID NO: 5621 - RNA, 19 nt, Influenza A virus
gaccaaaaggauucgaaug

SEQ ID NO: 5622 - RNA, 19 nt, Influenza A virus
cgaccaaaaggauucggau

SEQ ID NO: 5623 - RNA, 19 nt, Influenza A virus
cgaccaaaggaauucggau

SEQ ID NO: 5624 - RNA, 19 nt, Influenza A virus
cgaucaaaagaauucggau

SEQ ID NO: 5625 - RNA, 19 nt, Influenza A virus
cgaccaaaagaauucgaau

SEQ ID NO: 5626 - RNA, 19 nt, Influenza A virus
cgaccaaaagauuucggau

SEQ ID NO: 5627 - RNA, 19 nt, Influenza A virus
cgaccaaaaggauucgaau

SEQ ID NO: 5628 - RNA, 19 nt, Influenza A virus
aaaggauucggauggccau

SEQ ID NO: 5629 - RNA, 19 nt, Influenza A virus
aaggaauucggauggccau

SEQ ID NO: 5630 - RNA, 19 nt, Influenza A virus
aaagaauucgaauggccau

SEQ ID NO: 5631 - RNA, 19 nt, Influenza A virus
aaagaauucggauggccac

SEQ ID NO: 5632 - RNA, 19 nt, Influenza A virus
aaagauuucggauggccau

SEQ ID NO: 5633 - RNA, 19 nt, Influenza A virus
aaaggauucgaauggccau

SEQ ID NO: 5634 - RNA, 19 nt, Influenza A virus
agcgaccaaaaggauucgg

SEQ ID NO: 5635 - RNA, 19 nt, Influenza A virus
agcgaccaaaggaauucgg

SEQ ID NO: 5636 - RNA, 19 nt, Influenza A virus
agcgaccaaaagaauucga

SEQ ID NO: 5637 - RNA, 19 nt, Influenza A virus
agcgaccaaaagauuucgg

SEQ ID NO: 5638 - RNA, 19 nt, Influenza A virus
agcgaccaaaaggauucga

SEQ ID NO: 5639 - RNA, 19 nt, Influenza A virus
gacgaucaaaagaauucgg

SEQ ID NO: 5640 - RNA, 19 nt, Influenza A virus
gcgaccaaaaggauucgga

SEQ ID NO: 5641 - RNA, 19 nt, Influenza A virus
gcgaccaaaggaauucgga

SEQ ID NO: 5642 - RNA, 19 nt, Influenza A virus
gcgaccaaaagaauucgaa

SEQ ID NO: 5643 - RNA, 19 nt, Influenza A virus
gcgaccaaaagauuucgga

SEQ ID NO: 5644 - RNA, 19 nt, Influenza A virus
acgaucaaaagaauucgga

SEQ ID NO: 5645 - RNA, 19 nt, Influenza A virus
gcgaccaaaaggauucgaa

SEQ ID NO: 5646 - RNA, 19 nt, Influenza A virus
ccaaaaggauucggauggc

SEQ ID NO: 5647 - RNA, 19 nt, Influenza A virus
ccaaaggaauucggauggc

SEQ ID NO: 5648 - RNA, 19 nt, Influenza A virus
ucaaaagaauucggauggc

SEQ ID NO: 5649 - RNA, 19 nt, Influenza A virus
ccaaaagaauucgaauggc

SEQ ID NO: 5650 - RNA, 19 nt, Influenza A virus
ccaaaagauuucggauggc

SEQ ID NO: 5651 - RNA, 19 nt, Influenza A virus
ccaaaaggauucgaauggc

SEQ ID NO: 5652 - RNA, 19 nt, Influenza A virus
accaaaaggauucggaugg

SEQ ID NO: 5653 - RNA, 19 nt, Influenza A virus
accaaaggaauucggaugg

SEQ ID NO: 5654 - RNA, 19 nt, Influenza A virus
aucaaaagaauucggaugg

SEQ ID NO: 5655 - RNA, 19 nt, Influenza A virus
accaaaagaauucgaaugg

SEQ ID NO: 5656 - RNA, 19 nt, Influenza A virus
accaaaagauuucggaugg

SEQ ID NO: 5657 - RNA, 19 nt, Influenza A virus
accaaaaggauucgaaugg

SEQ ID NO: 5658 - RNA, 19 nt, Influenza A virus
gaauucggauggccauuaa

SEQ ID NO: 5659 - RNA, 19 nt, Influenza A virus
ggauucggauggccaucaa

SEQ ID NO: 5660 - RNA, 19 nt, Influenza A virus
gaauucgaauggccaucaa

SEQ ID NO: 5661 - RNA, 19 nt, Influenza A virus
gaauucggauggccaccaa

SEQ ID NO: 5662 - RNA, 19 nt, Influenza A virus
gauuucggauggccaucaa

SEQ ID NO: 5663 - RNA, 19 nt, Influenza A virus
ggauucgaauggccaucaa

SEQ ID NO: 5664 - RNA, 19 nt, Influenza A virus
uucggauggccauuaauua

SEQ ID NO: 5665 - RNA, 19 nt, Influenza A virus
uucgaauggccaucaauua

SEQ ID NO: 5666 - RNA, 19 nt, Influenza A virus
uucggauggccaucaagua

SEQ ID NO: 5667 - RNA, 19 nt, Influenza A virus
uucggauggccaucaauag

SEQ ID NO: 5668 - RNA, 19 nt, Influenza A virus
uucggauggccaccaauga

SEQ ID NO: 5669 - RNA, 19 nt, Influenza A virus
auucggauggccauuaauu

SEQ ID NO: 5670 - RNA, 19 nt, Influenza A virus
auucgaauggccaucaauu

SEQ ID NO: 5671 - RNA, 19 nt, Influenza A virus
auucggauggccaucaagu

SEQ ID NO: 5672 - RNA, 19 nt, Influenza A virus
auucggauggccaucaaua

SEQ ID NO: 5673 - RNA, 19 nt, Influenza A virus
uuucggauggccaucaauu

SEQ ID NO: 5674 - RNA, 19 nt, Influenza A virus
auucggauggccaccaaug

SEQ ID NO: 5675 - RNA, 19 nt, Influenza A virus
gacucuagcaugcuuacug

SEQ ID NO: 5676 - RNA, 19 nt, Influenza A virus
gacuuuagcauacuuacug

SEQ ID NO: 5677 - RNA, 19 nt, Influenza A virus
aacucuagcauacuuacug

SEQ ID NO: 5678 - RNA, 19 nt, Influenza A virus
gacuauagcauacuuacug

SEQ ID NO: 5679 - RNA, 19 nt, Influenza A virus
gacuccagcauacuuacug

SEQ ID NO: 5680 - RNA, 19 nt, Influenza A virus
gacucuaacauacuuacug

SEQ ID NO: 5681 - RNA, 19 nt, Influenza A virus
gacucuagcauacuuaccg

SEQ ID NO: 5682 - RNA, 19 nt, Influenza A virus
agaauucggauggccauua

SEQ ID NO: 5683 - RNA, 19 nt, Influenza A virus
aggauucggauggccauca

SEQ ID NO: 5684 - RNA, 19 nt, Influenza A virus
ggaauucggauggccauca

SEQ ID NO: 5685 - RNA, 19 nt, Influenza A virus
agaauucgaauggccauca

SEQ ID NO: 5686 - RNA, 19 nt, Influenza A virus
agaauucggauggccacca

SEQ ID NO: 5687 - RNA, 19 nt, Influenza A virus
agauuucggauggccauca

SEQ ID NO: 5688 - RNA, 19 nt, Influenza A virus
aggauucgaauggccauca

SEQ ID NO: 5689 - RNA, 19 nt, Influenza A virus
aagaauucggauggccauu

SEQ ID NO: 5690 - RNA, 19 nt, Influenza A virus
aaggauucggauggccauc

SEQ ID NO: 5691 - RNA, 19 nt, Influenza A virus
aggaauucggauggccauc

SEQ ID NO: 5692 - RNA, 19 nt, Influenza A virus
aagaauucgaauggccauc

SEQ ID NO: 5693 - RNA, 19 nt, Influenza A virus
aagaauucggauggccacc

SEQ ID NO: 5694 - RNA, 19 nt, Influenza A virus
aagauuucggauggccauc

SEQ ID NO: 5695 - RNA, 19 nt, Influenza A virus
aaggauucgaauggccauc

SEQ ID NO: 5696 - RNA, 19 nt, Influenza A virus
aauucggauggccauuaau

SEQ ID NO: 5697 - RNA, 19 nt, Influenza A virus
gauucggauggccaucaau

SEQ ID NO: 5698 - RNA, 19 nt, Influenza A virus
aauucgaauggccaucaau

SEQ ID NO: 5699 - RNA, 19 nt, Influenza A virus
aauucggauggccaccaau

SEQ ID NO: 5700 - RNA, 19 nt, Influenza A virus
aauucggauggccaucaag

SEQ ID NO: 5701 - RNA, 19 nt, Influenza A virus
auuucggauggccaucaau

SEQ ID NO: 5702 - RNA, 19 nt, Influenza A virus
gauucgaauggccaucaau

SEQ ID NO: 5703 - RNA, 19 nt, Influenza A virus
gggacucuagcaugcuuac

SEQ ID NO: 5704 - RNA, 19 nt, Influenza A virus
gggacuuuagcauacuuac

SEQ ID NO: 5705 - RNA, 19 nt, Influenza A virus
gagacucuagcauacuuac

SEQ ID NO: 5706 - RNA, 19 nt, Influenza A virus
ggaacucuagcauacuuac

SEQ ID NO: 5707 - RNA, 19 nt, Influenza A virus
gggacuauagcauacuuac

SEQ ID NO: 5708 - RNA, 19 nt, Influenza A virus
gggacuccagcauacuuac

SEQ ID NO: 5709 - RNA, 19 nt, Influenza A virus
gggacucuaacauacuuac

SEQ ID NO: 5710 - RNA, 19 nt, Influenza A virus
acgggacucuagcaugcuu

SEQ ID NO: 5711 - RNA, 19 nt, Influenza A virus
acgggacuuuagcauacuu

SEQ ID NO: 5712 - RNA, 19 nt, Influenza A virus
aagggacucuagcauacuu

SEQ ID NO: 5713 - RNA, 19 nt, Influenza A virus
acgagacucuagcauacuu

SEQ ID NO: 5714 - RNA, 19 nt, Influenza A virus
acggaacucuagcauacuu

SEQ ID NO: 5715 - RNA, 19 nt, Influenza A virus
acgggacuauagcauacuu

SEQ ID NO: 5716 - RNA, 19 nt, Influenza A virus
acgggacuccagcauacuu

SEQ ID NO: 5717 - RNA, 19 nt, Influenza A virus
acgggacucuaacauacuu

SEQ ID NO: 5718 - RNA, 19 nt, Influenza A virus
aaacgggacucuagcaugc

SEQ ID NO: 5719 - RNA, 19 nt, Influenza A virus
aaacgggacuuuagcauac

SEQ ID NO: 5720 - RNA, 19 nt, Influenza A virus
aaaagggacucuagcauac

SEQ ID NO: 5721 - RNA, 19 nt, Influenza A virus
aaacgagacucuagcauac

SEQ ID NO: 5722 - RNA, 19 nt, Influenza A virus
aaacggaacucuagcauac

SEQ ID NO: 5723 - RNA, 19 nt, Influenza A virus
aaacgggacuauagcauac

SEQ ID NO: 5724 - RNA, 19 nt, Influenza A virus
aaacgggacuccagcauac

SEQ ID NO: 5725 - RNA, 19 nt, Influenza A virus
aaacgggacucuaacauac

SEQ ID NO: 5726 - RNA, 19 nt, Influenza A virus
cgggacucuagcaugcuua

SEQ ID NO: 5727 - RNA, 19 nt, Influenza A virus
cgggacuuuagcauacuua

SEQ ID NO: 5728 - RNA, 19 nt, Influenza A virus
agggacucuagcauacuua

SEQ ID NO: 5729 - RNA, 19 nt, Influenza A virus
cgagacucuagcauacuua

SEQ ID NO: 5730 - RNA, 19 nt, Influenza A virus
cggaacucuagcauacuua

SEQ ID NO: 5731 - RNA, 19 nt, Influenza A virus
cgggacuauagcauacuua

SEQ ID NO: 5732 - RNA, 19 nt, Influenza A virus
cgggacuccagcauacuua

SEQ ID NO: 5733 - RNA, 19 nt, Influenza A virus
cgggacucuaacauacuua

SEQ ID NO: 5734 - RNA, 19 nt, Influenza A virus
aacgggacucuagcaugcu

SEQ ID NO: 5735 - RNA, 19 nt, Influenza A virus
aacgggacuuuagcauacu

SEQ ID NO: 5736 - RNA, 19 nt, Influenza A virus
aaagggacucuagcauacu

SEQ ID NO: 5737 - RNA, 19 nt, Influenza A virus
aacgagacucuagcauacu

SEQ ID NO: 5738 - RNA, 19 nt, Influenza A virus
aacggaacucuagcauacu

SEQ ID NO: 5739 - RNA, 19 nt, Influenza A virus
aacgggacuauagcauacu

SEQ ID NO: 5740 - RNA, 19 nt, Influenza A virus
aacgggacuccagcauacu

SEQ ID NO: 5741 - RNA, 19 nt, Influenza A virus
aacgggacucuaacauacu

SEQ ID NO: 5742 - RNA, 19 nt, Influenza A virus
ggacucuagcaugcuuacu

SEQ ID NO: 5743 - RNA, 19 nt, Influenza A virus
ggacuuuagcauacuuacu

SEQ ID NO: 5744 - RNA, 19 nt, Influenza A virus
agacucuagcauacuuacu

SEQ ID NO: 5745 - RNA, 19 nt, Influenza A virus
gaacucuagcauacuuacu

SEQ ID NO: 5746 - RNA, 19 nt, Influenza A virus
ggacuauagcauacuuacu

SEQ ID NO: 5747 - RNA, 19 nt, Influenza A virus
ggacuccagcauacuuacu

SEQ ID NO: 5748 - RNA, 19 nt, Influenza A virus
ggacucuaacauacuuacu

SEQ ID NO: 5749 - RNA, 19 nt, Influenza A virus
ggacucuagcauacuuacc

SEQ ID NO: 5750 - RNA, 19 nt, Influenza A virus
augaaacggaaacgggacu

SEQ ID NO: 5751 - RNA, 19 nt, Influenza A virus
augaaacgaaaaagggacu

SEQ ID NO: 5752 - RNA, 19 nt, Influenza A virus
augaaacgaaaacgagacu

SEQ ID NO: 5753 - RNA, 19 nt, Influenza A virus
augaaacgaaaacggaacu

SEQ ID NO: 5754 - RNA, 19 nt, Influenza A virus
augaaacggaaacgagacu

SEQ ID NO: 5755 - RNA, 19 nt, Influenza A virus
augaaacggaaacggaacu

SEQ ID NO: 5756 - RNA, 19 nt, Influenza A virus
gaaauggaugauggcgaug

SEQ ID NO: 5757 - RNA, 19 nt, Influenza A virus
gaaguggaugauggcaaug

SEQ ID NO: 5758 - RNA, 19 nt, Influenza A virus
uggaugauggcaaugagau

SEQ ID NO: 5759 - RNA, 19 nt, Influenza A virus
uggaugauggcgaugaaau

SEQ ID NO: 5760 - RNA, 19 nt, Influenza A virus
ugaaauggaugauggcgau

SEQ ID NO: 5761 - RNA, 19 nt, Influenza A virus
ugaaguggaugauggcaau

SEQ ID NO: 5762 - RNA, 19 nt, Influenza A virus
ggaugauggcaaugagaua

SEQ ID NO: 5763 - RNA, 19 nt, Influenza A virus
ggaugauggcgaugaaaua

SEQ ID NO: 5764 - RNA, 19 nt, Influenza A virus
ugaaacggaaacgggacuc

SEQ ID NO: 5765 - RNA, 19 nt, Influenza A virus
ugaaacggaaacgggacuu

SEQ ID NO: 5766 - RNA, 19 nt, Influenza A virus
ugaaacgaaaaagggacuc

SEQ ID NO: 5767 - RNA, 19 nt, Influenza A virus
ugaaacgaaaacgagacuc

SEQ ID NO: 5768 - RNA, 19 nt, Influenza A virus
ugaaacgaaaacggaacuc

SEQ ID NO: 5769 - RNA, 19 nt, Influenza A virus
ugaaacgaaaacgggacua

SEQ ID NO: 5770 - RNA, 19 nt, Influenza A virus
ugaaacggaaacgagacuc

SEQ ID NO: 5771 - RNA, 19 nt, Influenza A virus
ugaaacggaaacggaacuc

SEQ ID NO: 5772 - RNA, 19 nt, Influenza A virus
aaauggaugauggcgauga

SEQ ID NO: 5773 - RNA, 19 nt, Influenza A virus
aaguggaugauggcaauga

SEQ ID NO: 5774 - RNA, 19 nt, Influenza A virus
auggaugauggcaaugaga

SEQ ID NO: 5775 - RNA, 19 nt, Influenza A virus
auggaugauggcgaugaaa

SEQ ID NO: 5776 - RNA, 19 nt, Influenza A virus
guggaugauggcaaugaaa

SEQ ID NO: 5777 - RNA, 19 nt, Influenza A virus
aauggaugauggcaaugag

SEQ ID NO: 5778 - RNA, 19 nt, Influenza A virus
aauggaugauggcgaugaa

SEQ ID NO: 5779 - RNA, 19 nt, Influenza A virus
aguggaugauggcaaugaa

SEQ ID NO: 5780 - RNA, 19 nt, Influenza A virus
augaaauggaugauggcga

SEQ ID NO: 5781 - RNA, 19 nt, Influenza A virus
augaaguggaugauggcaa

SEQ ID NO: 5782 - RNA, 19 nt, Influenza A virus
gugaaauggaugauggcaa

SEQ ID NO: 5783 - RNA, 19 nt, Influenza A virus
gaaacggaaacgggacucu

SEQ ID NO: 5784 - RNA, 19 nt, Influenza A virus
gaaacggaaacgggacuuu

SEQ ID NO: 5785 - RNA, 19 nt, Influenza A virus
gaaacgaaaaagggacucu

SEQ ID NO: 5786 - RNA, 19 nt, Influenza A virus
gaaacgaaaacgagacucu

SEQ ID NO: 5787 - RNA, 19 nt, Influenza A virus
gaaacgaaaacggaacucu

SEQ ID NO: 5788 - RNA, 19 nt, Influenza A virus
gaaacgaaaacgggacuau

SEQ ID NO: 5789 - RNA, 19 nt, Influenza A virus
gaaacgaaaacgggacucc

SEQ ID NO: 5790 - RNA, 19 nt, Influenza A virus
gaaacggaaacgagacucu

SEQ ID NO: 5791 - RNA, 19 nt, Influenza A virus
gaaacggaaacggaacucu

SEQ ID NO: 5792 - RNA, 19 nt, Influenza A virus
aaacggaaacgggacucua

SEQ ID NO: 5793 - RNA, 19 nt, Influenza A virus
aaacggaaacgggacuuua

SEQ ID NO: 5794 - RNA, 19 nt, Influenza A virus
aaacgaaaaagggacucua

SEQ ID NO: 5795 - RNA, 19 nt, Influenza A virus
aaacgaaaacgagacucua

SEQ ID NO: 5796 - RNA, 19 nt, Influenza A virus
aaacgaaaacggaacucua

SEQ ID NO: 5797 - RNA, 19 nt, Influenza A virus
aaacgaaaacgggacuaua

SEQ ID NO: 5798 - RNA, 19 nt, Influenza A virus
aaacgaaaacgggacucca

SEQ ID NO: 5799 - RNA, 19 nt, Influenza A virus
aaacggaaacgagacucua

SEQ ID NO: 5800 - RNA, 19 nt, Influenza A virus
aaacggaaacggaacucua

SEQ ID NO: 5801 - RNA, 19 nt, Influenza A virus
aacggaaacgggacucuag

SEQ ID NO: 5802 - RNA, 19 nt, Influenza A virus
aacggaaacgggacuuuag

SEQ ID NO: 5803 - RNA, 19 nt, Influenza A virus
aacgaaaaagggacucuag

SEQ ID NO: 5804 - RNA, 19 nt, Influenza A virus
aacgaaaacgagacucuag

SEQ ID NO: 5805 - RNA, 19 nt, Influenza A virus
aacgaaaacggaacucuag

SEQ ID NO: 5806 - RNA, 19 nt, Influenza A virus
aacgaaaacgggacuauag

SEQ ID NO: 5807 - RNA, 19 nt, Influenza A virus
aacgaaaacgggacuccag

SEQ ID NO: 5808 - RNA, 19 nt, Influenza A virus
aacgaaaacgggacucuaa

SEQ ID NO: 5809 - RNA, 19 nt, Influenza A virus
aacggaaacgagacucuag

SEQ ID NO: 5810 - RNA, 19 nt, Influenza A virus
aacggaaacggaacucuag

SEQ ID NO: 5811 - RNA, 19 nt, Influenza A virus
ggaaacgggacucuagcau

SEQ ID NO: 5812 - RNA, 19 nt, Influenza A virus
ggaaacgggacuuuagcau

SEQ ID NO: 5813 - RNA, 19 nt, Influenza A virus
gaaaaagggacucuagcau

SEQ ID NO: 5814 - RNA, 19 nt, Influenza A virus
gaaaacgagacucuagcau

SEQ ID NO: 5815 - RNA, 19 nt, Influenza A virus
gaaaacggaacucuagcau

SEQ ID NO: 5816 - RNA, 19 nt, Influenza A virus
gaaaacgggacuauagcau

SEQ ID NO: 5817 - RNA, 19 nt, Influenza A virus
gaaaacgggacuccagcau

SEQ ID NO: 5818 - RNA, 19 nt, Influenza A virus
gaaaacgggacucuaacau

SEQ ID NO: 5819 - RNA, 19 nt, Influenza A virus
ggaaacgagacucuagcau

SEQ ID NO: 5820 - RNA, 19 nt, Influenza A virus
ggaaacggaacucuagcau

SEQ ID NO: 5821 - RNA, 19 nt, Influenza A virus
acggaaacgggacucuagc

SEQ ID NO: 5822 - RNA, 19 nt, Influenza A virus
acggaaacgggacuuuagc

SEQ ID NO: 5823 - RNA, 19 nt, Influenza A virus
acgaaaaagggacucuagc

SEQ ID NO: 5824 - RNA, 19 nt, Influenza A virus
acgaaaacgagacucuagc

SEQ ID NO: 5825 - RNA, 19 nt, Influenza A virus
acgaaaacggaacucuagc

SEQ ID NO: 5826 - RNA, 19 nt, Influenza A virus
acgaaaacgggacuauagc

SEQ ID NO: 5827 - RNA, 19 nt, Influenza A virus
acgaaaacgggacuccagc

SEQ ID NO: 5828 - RNA, 19 nt, Influenza A virus
acgaaaacgggacucuaac

SEQ ID NO: 5829 - RNA, 19 nt, Influenza A virus
acggaaacgagacucuagc

SEQ ID NO: 5830 - RNA, 19 nt, Influenza A virus
acggaaacggaacucuagc

SEQ ID NO: 5831 - RNA, 19 nt, Influenza A virus
cggaaacgggacucuagca

SEQ ID NO: 5832 - RNA, 19 nt, Influenza A virus
cggaaacgggacuuuagca

SEQ ID NO: 5833 - RNA, 19 nt, Influenza A virus
cgaaaaagggacucuagca

SEQ ID NO: 5834 - RNA, 19 nt, Influenza A virus
cgaaaacgagacucuagca

SEQ ID NO: 5835 - RNA, 19 nt, Influenza A virus
cgaaaacggaacucuagca

SEQ ID NO: 5836 - RNA, 19 nt, Influenza A virus
cgaaaacgggacuauagca

SEQ ID NO: 5837 - RNA, 19 nt, Influenza A virus
cgaaaacgggacuccagca

SEQ ID NO: 5838 - RNA, 19 nt, Influenza A virus
cgaaaacgggacucuaaca

SEQ ID NO: 5839 - RNA, 19 nt, Influenza A virus
cggaaacgagacucuagca

SEQ ID NO: 5840 - RNA, 19 nt, Influenza A virus
cggaaacggaacucuagca

SEQ ID NO: 5841 - RNA, 19 nt, Influenza A virus
aaaacgggacucuagcaug

SEQ ID NO: 5842 - RNA, 19 nt, Influenza A virus
gaaacgggacucuagcaua

SEQ ID NO: 5843 - RNA, 19 nt, Influenza A virus
gaaacgggacuuuagcaua

SEQ ID NO: 5844 - RNA, 19 nt, Influenza A virus
aaaaagggacucuagcaua

SEQ ID NO: 5845 - RNA, 19 nt, Influenza A virus
aaaacgagacucuagcaua

SEQ ID NO: 5846 - RNA, 19 nt, Influenza A virus
aaaacggaacucuagcaua

SEQ ID NO: 5847 - RNA, 19 nt, Influenza A virus
aaaacgggacuauagcaua

SEQ ID NO: 5848 - RNA, 19 nt, Influenza A virus
aaaacgggacuccagcaua

SEQ ID NO: 5849 - RNA, 19 nt, Influenza A virus
aaaacgggacucuaacaua

SEQ ID NO: 5850 - RNA, 19 nt, Influenza A virus
gaaacgagacucuagcaua

SEQ ID NO: 5851 - RNA, 19 nt, Influenza A virus
gaaacggaacucuagcaua

SEQ ID NO: 5852 - RNA, 19 nt, Influenza A virus
gaaagguuaaaacauggga

SEQ ID NO: 5853 - RNA, 19 nt, Influenza A virus
gaaagguugaaacauggaa

SEQ ID NO: 5854 - RNA, 19 nt, Influenza A virus
gaaagauuaaaacauggaa

SEQ ID NO: 5855 - RNA, 19 nt, Influenza A virus
gaaagguuaaaaaauggaa

SEQ ID NO: 5856 - RNA, 19 nt, Influenza A virus
gaaagguuaaaacacggaa

SEQ ID NO: 5857 - RNA, 19 nt, Influenza A virus
gaaaggcuaaagcauggaa

SEQ ID NO: 5858 - RNA, 19 nt, Influenza A virus
gaaagguuaaagcacggaa

SEQ ID NO: 5859 - RNA, 19 nt, Influenza A virus
gaaagauuaaaacacggaa

SEQ ID NO: 5860 - RNA, 19 nt, Influenza A virus
gaaagauuaaaacacggga

SEQ ID NO: 5861 - RNA, 19 nt, Influenza A virus
aaagguuaaaacaugggac

SEQ ID NO: 5862 - RNA, 19 nt, Influenza A virus
aaagguugaaacauggaac

SEQ ID NO: 5863 - RNA, 19 nt, Influenza A virus
aaagauuaaaacauggaac

SEQ ID NO: 5864 - RNA, 19 nt, Influenza A virus
aaagguuaaaaaauggaac

SEQ ID NO: 5865 - RNA, 19 nt, Influenza A virus
aaagguuaaaacacggaac

SEQ ID NO: 5866 - RNA, 19 nt, Influenza A virus
aaaggcuaaagcauggaac

SEQ ID NO: 5867 - RNA, 19 nt, Influenza A virus
aaagguuaaagcacggaac

SEQ ID NO: 5868 - RNA, 19 nt, Influenza A virus
aaagauuaaaacacggaac

SEQ ID NO: 5869 - RNA, 19 nt, Influenza A virus
aaagauuaaaacacgggac

SEQ ID NO: 5870 - RNA, 19 nt, Influenza A virus
aagguuaaaacauggaacu

SEQ ID NO: 5871 - RNA, 19 nt, Influenza A virus
aagguuaaaacaugggacc

SEQ ID NO: 5872 - RNA, 19 nt, Influenza A virus
aagguugaaacauggaacc

SEQ ID NO: 5873 - RNA, 19 nt, Influenza A virus
aagauuaaaacauggaacc

SEQ ID NO: 5874 - RNA, 19 nt, Influenza A virus
aagguuaaaaaauggaacc

SEQ ID NO: 5875 - RNA, 19 nt, Influenza A virus
aagguuaaaacacggaacc

SEQ ID NO: 5876 - RNA, 19 nt, Influenza A virus
aaggcuaaagcauggaacc

SEQ ID NO: 5877 - RNA, 19 nt, Influenza A virus
aagguuaaagcacggaacc

SEQ ID NO: 5878 - RNA, 19 nt, Influenza A virus
aagauuaaaacacggaacc

SEQ ID NO: 5879 - RNA, 19 nt, Influenza A virus
aagauuaaaacacgggacc

SEQ ID NO: 5880 - RNA, 19 nt, Influenza A virus
gguuaaaacauggaacuuu

SEQ ID NO: 5881 - RNA, 19 nt, Influenza A virus
gguuaaaacaugggaccuu

SEQ ID NO: 5882 - RNA, 19 nt, Influenza A virus
gguugaaacauggaaccuu

SEQ ID NO: 5883 - RNA, 19 nt, Influenza A virus
gauuaaaacauggaaccuu

SEQ ID NO: 5884 - RNA, 19 nt, Influenza A virus
gguuaaaaaauggaaccuu

SEQ ID NO: 5885 - RNA, 19 nt, Influenza A virus
gguuaaaacacggaaccuu

SEQ ID NO: 5886 - RNA, 19 nt, Influenza A virus
ggcuaaagcauggaaccuu

SEQ ID NO: 5887 - RNA, 19 nt, Influenza A virus
gguuaaagcacggaaccuu

SEQ ID NO: 5888 - RNA, 19 nt, Influenza A virus
gauuaaaacacggaaccuu

SEQ ID NO: 5889 - RNA, 19 nt, Influenza A virus
gauuaaaacacgggaccuu

SEQ ID NO: 5890 - RNA, 19 nt, Influenza A virus
agguuaaaacauggaacuu

SEQ ID NO: 5891 - RNA, 19 nt, Influenza A virus
agguuaaaacaugggaccu

SEQ ID NO: 5892 - RNA, 19 nt, Influenza A virus
agguugaaacauggaaccu

SEQ ID NO: 5893 - RNA, 19 nt, Influenza A virus
agauuaaaacauggaaccu

SEQ ID NO: 5894 - RNA, 19 nt, Influenza A virus
agguuaaaaaauggaaccu

SEQ ID NO: 5895 - RNA, 19 nt, Influenza A virus
agguuaaaacacggaaccu

SEQ ID NO: 5896 - RNA, 19 nt, Influenza A virus
aggcuaaagcauggaaccu

SEQ ID NO: 5897 - RNA, 19 nt, Influenza A virus
agguuaaagcacggaaccu

SEQ ID NO: 5898 - RNA, 19 nt, Influenza A virus
agauuaaaacacggaaccu

SEQ ID NO: 5899 - RNA, 19 nt, Influenza A virus
agauuaaaacacgggaccu

SEQ ID NO: 5900 - RNA, 19 nt, Influenza A virus
cucgcacucgcgagauauu

SEQ ID NO: 5901 - RNA, 19 nt, Influenza A virus
cucgcacucgugagauacu

SEQ ID NO: 5902 - RNA, 19 nt, Influenza A virus
cucgcauucgcgagauacu

SEQ ID NO: 5903 - RNA, 19 nt, Influenza A virus
uucgcacucgcgagauacu

SEQ ID NO: 5904 - RNA, 19 nt, Influenza A virus
cccgcacucgcgagauacu

SEQ ID NO: 5905 - RNA, 19 nt, Influenza A virus
cucgcacacgcgagauacu

SEQ ID NO: 5906 - RNA, 19 nt, Influenza A virus
cucgcacccgcgagauacu

SEQ ID NO: 5907 - RNA, 19 nt, Influenza A virus
cucgcacucgcgaaauacu

SEQ ID NO: 5908 - RNA, 19 nt, Influenza A virus
cucgcacucgcggaauacu

SEQ ID NO: 5909 - RNA, 19 nt, Influenza A virus
uucgcacacgcgagauacu

SEQ ID NO: 5910 - RNA, 19 nt, Influenza A virus
cccgcacgcgcgagauacu

SEQ ID NO: 5911 - RNA, 19 nt, Influenza A virus
cucgcacugucgagauacu

SEQ ID NO: 5912 - RNA, 19 nt, Influenza A virus
ucucgcacucgcgagauau

SEQ ID NO: 5913 - RNA, 19 nt, Influenza A virus
ucucgcacucgugagauac

SEQ ID NO: 5914 - RNA, 19 nt, Influenza A virus
ucucgcauucgcgagauac

SEQ ID NO: 5915 - RNA, 19 nt, Influenza A virus
uuucgcacucgcgagauac

SEQ ID NO: 5916 - RNA, 19 nt, Influenza A virus
ucccgcacucgcgagauac

SEQ ID NO: 5917 - RNA, 19 nt, Influenza A virus
ucucgcacacgcgagauac

SEQ ID NO: 5918 - RNA, 19 nt, Influenza A virus
ucucgcacccgcgagauac

SEQ ID NO: 5919 - RNA, 19 nt, Influenza A virus
ucucgcacucgcgaaauac

SEQ ID NO: 5920 - RNA, 19 nt, Influenza A virus
ucucgcacucgcggaauac

SEQ ID NO: 5921 - RNA, 19 nt, Influenza A virus
uuucgcacacgcgagauac

SEQ ID NO: 5922 - RNA, 19 nt, Influenza A virus
ucccgcacgcgcgagauac

SEQ ID NO: 5923 - RNA, 19 nt, Influenza A virus
ucucgcacugucgagauac

SEQ ID NO: 5924 - RNA, 19 nt, Influenza A virus
uaaaagcgguuagagguga

SEQ ID NO: 5925 - RNA, 19 nt, Influenza A virus
ugaaagcaguuagagguga

SEQ ID NO: 5926 - RNA, 19 nt, Influenza A virus
uaaaggcaguuagggguga

SEQ ID NO: 5927 - RNA, 19 nt, Influenza A virus
uaaaagcagucagagguga

SEQ ID NO: 5928 - RNA, 19 nt, Influenza A virus
uaaaagcaguuagaggaga

SEQ ID NO: 5929 - RNA, 19 nt, Influenza A virus
uaaaaucaguuagagguga

SEQ ID NO: 5930 - RNA, 19 nt, Influenza A virus
uaaaagcagucagggguga

SEQ ID NO: 5931 - RNA, 19 nt, Influenza A virus
uaaaggcaguccgagguga

SEQ ID NO: 5932 - RNA, 19 nt, Influenza A virus
ucggauggccaucaauuag

SEQ ID NO: 5933 - RNA, 19 nt, Influenza A virus
ucggauggccauuaauuaa

SEQ ID NO: 5934 - RNA, 19 nt, Influenza A virus
ucgaauggccaucaauuaa

SEQ ID NO: 5935 - RNA, 19 nt, Influenza A virus
ucggauggccaucaaguaa

SEQ ID NO: 5936 - RNA, 19 nt, Influenza A virus
ucggauggccaucaauagg

SEQ ID NO: 5937 - RNA, 19 nt, Influenza A virus
ucggauggccaccaaugag

SEQ ID NO: 5938 - RNA, 19 nt, Influenza A virus
aggaugaaguggaugaugg

SEQ ID NO: 5939 - RNA, 19 nt, Influenza A virus
agggugaaauggaugaugg

SEQ ID NO: 5940 - RNA, 19 nt, Influenza A virus
agaaugaaauggaugaugg

SEQ ID NO: 5941 - RNA, 19 nt, Influenza A virus
ggaugaaguggaugauggc

SEQ ID NO: 5942 - RNA, 19 nt, Influenza A virus
gggugaaauggaugauggc

SEQ ID NO: 5943 - RNA, 19 nt, Influenza A virus
gaaugaaauggaugauggc

SEQ ID NO: 5944 - RNA, 19 nt, Influenza A virus
uuaggaugaaguggaugau

SEQ ID NO: 5945 - RNA, 19 nt, Influenza A virus
uuagggugaaauggaugau

SEQ ID NO: 5946 - RNA, 19 nt, Influenza A virus
ucaggaugaaauggaugau

SEQ ID NO: 5947 - RNA, 19 nt, Influenza A virus
uuagaaugaaauggaugau

SEQ ID NO: 5948 - RNA, 19 nt, Influenza A virus
ucagaaugaaauggaugau

SEQ ID NO: 5949 - RNA, 19 nt, Influenza A virus
augguugcauacauguugg

SEQ ID NO: 5950 - RNA, 19 nt, Influenza A virus
augguugcguacauguuag

SEQ ID NO: 5951 - RNA, 19 nt, Influenza A virus
augauugcauacauguuag

SEQ ID NO: 5952 - RNA, 19 nt, Influenza A virus
auggucgcauacauguuag

SEQ ID NO: 5953 - RNA, 19 nt, Influenza A virus
augguggcauacauguugg

SEQ ID NO: 5954 - RNA, 19 nt, Influenza A virus
augguggcauauauguugg

SEQ ID NO: 5955 - RNA, 19 nt, Influenza A virus
uaggaugaaguggaugaug

SEQ ID NO: 5956 - RNA, 19 nt, Influenza A virus
uagggugaaauggaugaug

SEQ ID NO: 5957 - RNA, 19 nt, Influenza A virus
caggaugaaauggaugaug

SEQ ID NO: 5958 - RNA, 19 nt, Influenza A virus
uagaaugaaauggaugaug

SEQ ID NO: 5959 - RNA, 19 nt, Influenza A virus
cagaaugaaauggaugaug

SEQ ID NO: 5960 - RNA, 19 nt, Influenza A virus
ugguugcauacauguugga

SEQ ID NO: 5961 - RNA, 19 nt, Influenza A virus
ugguugcguacauguuaga

SEQ ID NO: 5962 - RNA, 19 nt, Influenza A virus
ugauugcauacauguuaga

SEQ ID NO: 5963 - RNA, 19 nt, Influenza A virus
uggucgcauacauguuaga

SEQ ID NO: 5964 - RNA, 19 nt, Influenza A virus
ugguggcauacauguugga

SEQ ID NO: 5965 - RNA, 19 nt, Influenza A virus
ugguggcauauauguugga

SEQ ID NO: 5966 - RNA, 19 nt, Influenza A virus
cuuaggaugaaguggauga

SEQ ID NO: 5967 - RNA, 19 nt, Influenza A virus
cuuagggugaaauggauga

SEQ ID NO: 5968 - RNA, 19 nt, Influenza A virus
cucaggaugaaauggauga

SEQ ID NO: 5969 - RNA, 19 nt, Influenza A virus
cuuagaaugaaauggauga

SEQ ID NO: 5970 - RNA, 19 nt, Influenza A virus
cucagaaugaaauggauga

SEQ ID NO: 5971 - RNA, 19 nt, Influenza A virus
uugcauacauguuggagag

SEQ ID NO: 5972 - RNA, 19 nt, Influenza A virus
uugcguacauguuagagag

SEQ ID NO: 5973 - RNA, 19 nt, Influenza A virus
ucgcauacauguuagagag

SEQ ID NO: 5974 - RNA, 19 nt, Influenza A virus
uugcauacauguuagaaag

SEQ ID NO: 5975 - RNA, 19 nt, Influenza A virus
uggcauacauguuggagag

SEQ ID NO: 5976 - RNA, 19 nt, Influenza A virus
uugcauacauguuggaaag

SEQ ID NO: 5977 - RNA, 19 nt, Influenza A virus
uggcauacauguuggaaag

SEQ ID NO: 5978 - RNA, 19 nt, Influenza A virus
acuuaggaugaaguggaug

SEQ ID NO: 5979 - RNA, 19 nt, Influenza A virus
acuuagggugaaauggaug

SEQ ID NO: 5980 - RNA, 19 nt, Influenza A virus
acucaggaugaaauggaug

SEQ ID NO: 5981 - RNA, 19 nt, Influenza A virus
acuuagaaugaaauggaug

SEQ ID NO: 5982 - RNA, 19 nt, Influenza A virus
ucuuagaaugaaauggaug

SEQ ID NO: 5983 - RNA, 19 nt, Influenza A virus
guugcauacauguuggaga

SEQ ID NO: 5984 - RNA, 19 nt, Influenza A virus
guugcguacauguuagaga

SEQ ID NO: 5985 - RNA, 19 nt, Influenza A virus
auugcauacauguuagaga

SEQ ID NO: 5986 - RNA, 19 nt, Influenza A virus
gucgcauacauguuagaga

SEQ ID NO: 5987 - RNA, 19 nt, Influenza A virus
guugcauacauguuagaaa

SEQ ID NO: 5988 - RNA, 19 nt, Influenza A virus
guggcauacauguuggaga

SEQ ID NO: 5989 - RNA, 19 nt, Influenza A virus
guugcauacauguuggaaa

SEQ ID NO: 5990 - RNA, 19 nt, Influenza A virus
guggcauacauguuggaaa

SEQ ID NO: 5991 - RNA, 19 nt, Influenza A virus
uaaaacauggaacuuuugg

SEQ ID NO: 5992 - RNA, 19 nt, Influenza A virus
uaaaacaugggaccuuugg

SEQ ID NO: 5993 - RNA, 19 nt, Influenza A virus
uaaagcauggaaccuuugg

SEQ ID NO: 5994 - RNA, 19 nt, Influenza A virus
ugaaacauggaaccuuugg

SEQ ID NO: 5995 - RNA, 19 nt, Influenza A virus
uaaaaaauggaaccuuugg

SEQ ID NO: 5996 - RNA, 19 nt, Influenza A virus
uaaaacacggaaccuuugg

SEQ ID NO: 5997 - RNA, 19 nt, Influenza A virus
uaaaacauggaaccuucgg

SEQ ID NO: 5998 - RNA, 19 nt, Influenza A virus
  modified_base (17)..(17): a, c, g, u, unknown or other
uaaaacauggaaccuungg

SEQ ID NO: 5999 - RNA, 19 nt, Influenza A virus
uaaaacauggaaccuuuag

SEQ ID NO: 6000 - RNA, 19 nt, Influenza A virus
uaaaacacgggaccuuugg

SEQ ID NO: 6001 - RNA, 19 nt, Influenza A virus
uaaagcacggaaccuuugg

SEQ ID NO: 6002 - RNA, 19 nt, Influenza A virus
uaaaacacggaaccuucgg

SEQ ID NO: 6003 - RNA, 19 nt, Influenza A virus
uuaaaacauggaacuuuug

SEQ ID NO: 6004 - RNA, 19 nt, Influenza A virus
uuaaaacaugggaccuuug

SEQ ID NO: 6005 - RNA, 19 nt, Influenza A virus
uugaaacauggaaccuuug

SEQ ID NO: 6006 - RNA, 19 nt, Influenza A virus
uuaaaaaauggaaccuuug

SEQ ID NO: 6007 - RNA, 19 nt, Influenza A virus
uuaaaacacggaaccuuug

SEQ ID NO: 6008 - RNA, 19 nt, Influenza A virus
uuaaaacauggaaccuucg

SEQ ID NO: 6009 - RNA, 19 nt, Influenza A virus
  modified_base (18)..(18): a, c, g, u, unknown or other
uuaaaacauggaaccuung

SEQ ID NO: 6010 - RNA, 19 nt, Influenza A virus
uuaaaacauggaaccuuua

SEQ ID NO: 6011 - RNA, 19 nt, Influenza A virus
cuaaagcauggaaccuuug

SEQ ID NO: 6012 - RNA, 19 nt, Influenza A virus
uuaaaacacgggaccuuug

SEQ ID NO: 6013 - RNA, 19 nt, Influenza A virus
uuaaagcacggaaccuuug

SEQ ID NO: 6014 - RNA, 19 nt, Influenza A virus
uuaaaacacggaaccuucg

SEQ ID NO: 6015 - RNA, 19 nt, Influenza A virus
gguugcauacauguuggag

SEQ ID NO: 6016 - RNA, 19 nt, Influenza A virus
gguugcguacauguuagag

SEQ ID NO: 6017 - RNA, 19 nt, Influenza A virus
gauugcauacauguuagag

SEQ ID NO: 6018 - RNA, 19 nt, Influenza A virus
ggucgcauacauguuagag

SEQ ID NO: 6019 - RNA, 19 nt, Influenza A virus
gguugcauacauguuagaa

SEQ ID NO: 6020 - RNA, 19 nt, Influenza A virus
gguggcauacauguuggag

SEQ ID NO: 6021 - RNA, 19 nt, Influenza A virus
gguugcauacauguuggaa

SEQ ID NO: 6022 - RNA, 19 nt, Influenza A virus
gguggcauacauguuggaa

SEQ ID NO: 6023 - RNA, 19 nt, Influenza A virus
ugaugguugcguacauguu

SEQ ID NO: 6024 - RNA, 19 nt, Influenza A virus
uaaugguugcauacauguu

SEQ ID NO: 6025 - RNA, 19 nt, Influenza A virus
ugaugauugcauacauguu

SEQ ID NO: 6026 - RNA, 19 nt, Influenza A virus
ugauggucgcauacauguu

SEQ ID NO: 6027 - RNA, 19 nt, Influenza A virus
ugaugguggcauacauguu

SEQ ID NO: 6028 - RNA, 19 nt, Influenza A virus
uaaugguggcauacauguu

SEQ ID NO: 6029 - RNA, 19 nt, Influenza A virus
uaaugguggcauauauguu

SEQ ID NO: 6030 - RNA, 19 nt, Influenza A virus
augagaauacuugugaggg

SEQ ID NO: 6031 - RNA, 19 nt, Influenza A virus
augagaauacucguaaggg

SEQ ID NO: 6032 - RNA, 19 nt, Influenza A virus
augagaauacuuguaagag

SEQ ID NO: 6033 - RNA, 19 nt, Influenza A virus
augagaauacuugugagag

SEQ ID NO: 6034 - RNA, 19 nt, Influenza A virus
augacaauacuugugagag

SEQ ID NO: 6035 - RNA, 19 nt, Influenza A virus
ugagaauacuugugagggg

SEQ ID NO: 6036 - RNA, 19 nt, Influenza A virus
ugagaauacucguaagggg

SEQ ID NO: 6037 - RNA, 19 nt, Influenza A virus
ugagaauacuuguaagagg

SEQ ID NO: 6038 - RNA, 19 nt, Influenza A virus
ugagaauacuugugagagg

SEQ ID NO: 6039 - RNA, 19 nt, Influenza A virus
ugacaauacuugugagagg

SEQ ID NO: 6040 - RNA, 19 nt, Influenza A virus
cacuuaggaugaaguggau

SEQ ID NO: 6041 - RNA, 19 nt, Influenza A virus
cacuuagggugaaauggau

SEQ ID NO: 6042 - RNA, 19 nt, Influenza A virus
uacuuaggaugaaauggau

SEQ ID NO: 6043 - RNA, 19 nt, Influenza A virus
cacucaggaugaaauggau

SEQ ID NO: 6044 - RNA, 19 nt, Influenza A virus
cacuuagaaugaaauggau

SEQ ID NO: 6045 - RNA, 19 nt, Influenza A virus
cucuuagaaugaaauggau

SEQ ID NO: 6046 - RNA, 19 nt, Influenza A virus
guuaaaacauggaacuuuu

SEQ ID NO: 6047 - RNA, 19 nt, Influenza A virus
guuaaaacaugggaccuuu

SEQ ID NO: 6048 - RNA, 19 nt, Influenza A virus
guugaaacauggaaccuuu

SEQ ID NO: 6049 - RNA, 19 nt, Influenza A virus
auuaaaacauggaaccuuu

SEQ ID NO: 6050 - RNA, 19 nt, Influenza A virus
guuaaaaaauggaaccuuu

SEQ ID NO: 6051 - RNA, 19 nt, Influenza A virus
guuaaaacacggaaccuuu

SEQ ID NO: 6052 - RNA, 19 nt, Influenza A virus
guuaaaacauggaaccuuc

SEQ ID NO: 6053 - RNA, 19 nt, Influenza A virus
  modified_base (19)..(19): a, c, g, u, unknown or other
guuaaaacauggaaccuun

SEQ ID NO: 6054 - RNA, 19 nt, Influenza A virus
gcuaaagcauggaaccuuu

SEQ ID NO: 6055 - RNA, 19 nt, Influenza A virus
guuaaagcacggaaccuuu

SEQ ID NO: 6056 - RNA, 19 nt, Influenza A virus
auuaaaacacggaaccuuu

SEQ ID NO: 6057 - RNA, 19 nt, Influenza A virus
auuaaaacauggaaccuuc

SEQ ID NO: 6058 - RNA, 19 nt, Influenza A virus
auuaaaacacgggaccuuu

SEQ ID NO: 6059 - RNA, 19 nt, Influenza A virus
uugaugguugcguacaugu

SEQ ID NO: 6060 - RNA, 19 nt, Influenza A virus
cugaugguugcauacaugu

SEQ ID NO: 6061 - RNA, 19 nt, Influenza A virus
uuaaugguugcauacaugu

SEQ ID NO: 6062 - RNA, 19 nt, Influenza A virus
uugaugauugcauacaugu

SEQ ID NO: 6063 - RNA, 19 nt, Influenza A virus
uugauggucgcauacaugu

SEQ ID NO: 6064 - RNA, 19 nt, Influenza A virus
cugaugguggcauacaugu

SEQ ID NO: 6065 - RNA, 19 nt, Influenza A virus
uuaaugguggcauacaugu

SEQ ID NO: 6066 - RNA, 19 nt, Influenza A virus
uuaaugguggcauauaugu

SEQ ID NO: 6067 - RNA, 19 nt, Influenza A virus
gaugguugcauacauguug

SEQ ID NO: 6068 - RNA, 19 nt, Influenza A virus
gaugguugcguacauguua

SEQ ID NO: 6069 - RNA, 19 nt, Influenza A virus
aaugguugcauacauguua

SEQ ID NO: 6070 - RNA, 19 nt, Influenza A virus
gaugauugcauacauguua

SEQ ID NO: 6071 - RNA, 19 nt, Influenza A virus
gauggucgcauacauguua

SEQ ID NO: 6072 - RNA, 19 nt, Influenza A virus
aaugguugcauacauguug

SEQ ID NO: 6073 - RNA, 19 nt, Influenza A virus
gaugguggcauacauguug

SEQ ID NO: 6074 - RNA, 19 nt, Influenza A virus
aaugguggcauacauguug

SEQ ID NO: 6075 - RNA, 19 nt, Influenza A virus
ucacuuaggaugaagugga

SEQ ID NO: 6076 - RNA, 19 nt, Influenza A virus
ucacuuagggugaaaugga

SEQ ID NO: 6077 - RNA, 19 nt, Influenza A virus
uuacuuaggaugaaaugga

SEQ ID NO: 6078 - RNA, 19 nt, Influenza A virus
gcacuuaggaugaaaugga

SEQ ID NO: 6079 - RNA, 19 nt, Influenza A virus
ucacucaggaugaaaugga

SEQ ID NO: 6080 - RNA, 19 nt, Influenza A virus
ucacuuagaaugaaaugga

SEQ ID NO: 6081 - RNA, 19 nt, Influenza A virus
aacauggaaccuuuggucc

SEQ ID NO: 6082 - RNA, 19 nt, Influenza A virus
aacauggaacuuuuggccc

SEQ ID NO: 6083 - RNA, 19 nt, Influenza A virus
aacaugggaccuuuggccc

SEQ ID NO: 6084 - RNA, 19 nt, Influenza A virus
agcauggaaccuuuggccc

SEQ ID NO: 6085 - RNA, 19 nt, Influenza A virus
aacaugggaccuuuggucc

SEQ ID NO: 6086 - RNA, 19 nt, Influenza A virus
aaaauggaaccuuuggccc

SEQ ID NO: 6087 - RNA, 19 nt, Influenza A virus
aacacggaaccuuuggccc

SEQ ID NO: 6088 - RNA, 19 nt, Influenza A virus
  modified_base (14)..(14): a, c, g, u, unknown or other
aacauggaaccuunggccc

SEQ ID NO: 6089 - RNA, 19 nt, Influenza A virus
aacauggaaccuuuagccc

SEQ ID NO: 6090 - RNA, 19 nt, Influenza A virus
aacacgggaccuuuggccc

SEQ ID NO: 6091 - RNA, 19 nt, Influenza A virus
aacauggaaccuucggucc

SEQ ID NO: 6092 - RNA, 19 nt, Influenza A virus
agcacggaaccuuuggccc

SEQ ID NO: 6093 - RNA, 19 nt, Influenza A virus
aacacggaaccuucggccc

SEQ ID NO: 6094 - RNA, 19 nt, Influenza A virus
aaacauggaaccuuugguc

SEQ ID NO: 6095 - RNA, 19 nt, Influenza A virus
aaacauggaacuuuuggcc

SEQ ID NO: 6096 - RNA, 19 nt, Influenza A virus
aaacaugggaccuuuggcc

SEQ ID NO: 6097 - RNA, 19 nt, Influenza A virus
aagcauggaaccuuuggcc

SEQ ID NO: 6098 - RNA, 19 nt, Influenza A virus
aaacaugggaccuuugguc

SEQ ID NO: 6099 - RNA, 19 nt, Influenza A virus
aaaaauggaaccuuuggcc

SEQ ID NO: 6100 - RNA, 19 nt, Influenza A virus
aaacacggaaccuuuggcc

SEQ ID NO: 6101 - RNA, 19 nt, Influenza A virus
  modified_base (15)..(15): a, c, g, u, unknown or other
aaacauggaaccuunggcc

SEQ ID NO: 6102 - RNA, 19 nt, Influenza A virus
aaacauggaaccuuuagcc

SEQ ID NO: 6103 - RNA, 19 nt, Influenza A virus
aaacacgggaccuuuggcc

SEQ ID NO: 6104 - RNA, 19 nt, Influenza A virus
aaacauggaaccuucgguc

SEQ ID NO: 6105 - RNA, 19 nt, Influenza A virus
aagcacggaaccuuuggcc

SEQ ID NO: 6106 - RNA, 19 nt, Influenza A virus
aaacacggaaccuucggcc

SEQ ID NO: 6107 - RNA, 19 nt, Influenza A virus
caagcuguggauauaugua

SEQ ID NO: 6108 - RNA, 19 nt, Influenza A virus
caggcuguggauauaugca

SEQ ID NO: 6109 - RNA, 19 nt, Influenza A virus
caagcaguggauauaugca

SEQ ID NO: 6110 - RNA, 19 nt, Influenza A virus
caagccguggauauaugca

SEQ ID NO: 6111 - RNA, 19 nt, Influenza A virus
caagcuguagauauaugca

SEQ ID NO: 6112 - RNA, 19 nt, Influenza A virus
caagcugugaauauaugca

SEQ ID NO: 6113 - RNA, 19 nt, Influenza A virus
caagcuguggaaauaugca

SEQ ID NO: 6114 - RNA, 19 nt, Influenza A virus
caagcuguggacauaugca

SEQ ID NO: 6115 - RNA, 19 nt, Influenza A virus
caagccguggauauaugua

SEQ ID NO: 6116 - RNA, 19 nt, Influenza A virus
caagccguggguauaugca

SEQ ID NO: 6117 - RNA, 19 nt, Influenza A virus
caagcaguagauauaugca

SEQ ID NO: 6118 - RNA, 19 nt, Influenza A virus
caagccguggauauuugca

SEQ ID NO: 6119 - RNA, 19 nt, Influenza A virus
aagcuguggauauauguaa

SEQ ID NO: 6120 - RNA, 19 nt, Influenza A virus
aggcuguggauauaugcaa

SEQ ID NO: 6121 - RNA, 19 nt, Influenza A virus
aagcaguggauauaugcaa

SEQ ID NO: 6122 - RNA, 19 nt, Influenza A virus
aagccguggauauaugcaa

SEQ ID NO: 6123 - RNA, 19 nt, Influenza A virus
aagcuguagauauaugcaa

SEQ ID NO: 6124 - RNA, 19 nt, Influenza A virus
aagcugugaauauaugcaa

SEQ ID NO: 6125 - RNA, 19 nt, Influenza A virus
aagcuguggaaauaugcaa

SEQ ID NO: 6126 - RNA, 19 nt, Influenza A virus
aagcuguggacauaugcaa

SEQ ID NO: 6127 - RNA, 19 nt, Influenza A virus
aagccguggauauauguaa

SEQ ID NO: 6128 - RNA, 19 nt, Influenza A virus
aagccguggguauaugcaa

SEQ ID NO: 6129 - RNA, 19 nt, Influenza A virus
aagcaguagauauaugcaa

SEQ ID NO: 6130 - RNA, 19 nt, Influenza A virus
aagccguggauauuugcaa

SEQ ID NO: 6131 - RNA, 19 nt, Influenza A virus
aaaacauggaaccuuuggu

SEQ ID NO: 6132 - RNA, 19 nt, Influenza A virus
aaaacauggaacuuuuggc

SEQ ID NO: 6133 - RNA, 19 nt, Influenza A virus
aaaacaugggaccuuuggc

SEQ ID NO: 6134 - RNA, 19 nt, Influenza A virus
aaagcauggaaccuuuggc

SEQ ID NO: 6135 - RNA, 19 nt, Influenza A virus
gaaacauggaaccuuuggc

SEQ ID NO: 6136 - RNA, 19 nt, Influenza A virus
aaaacaugggaccuuuggu

SEQ ID NO: 6137 - RNA, 19 nt, Influenza A virus
aaaaaauggaaccuuuggc

SEQ ID NO: 6138 - RNA, 19 nt, Influenza A virus
aaaacacggaaccuuuggc

SEQ ID NO: 6139 - RNA, 19 nt, Influenza A virus
  modified_base (16)..(16): a, c, g, u, unknown or other
aaaacauggaaccuunggc

SEQ ID NO: 6140 - RNA, 19 nt, Influenza A virus
aaaacauggaaccuuuagc

SEQ ID NO: 6141 - RNA, 19 nt, Influenza A virus
aaaacacgggaccuuuggc

SEQ ID NO: 6142 - RNA, 19 nt, Influenza A virus
aaaacauggaaccuucggu

SEQ ID NO: 6143 - RNA, 19 nt, Influenza A virus
aaagcacggaaccuuuggc

SEQ ID NO: 6144 - RNA, 19 nt, Influenza A virus
aaaacacggaaccuucggc

SEQ ID NO: 6145 - RNA, 19 nt, Influenza A virus
guaaugaaacggaaacggg

SEQ ID NO: 6146 - RNA, 19 nt, Influenza A virus
gugaugaaacgaaaacggg

SEQ ID NO: 6147 - RNA, 19 nt, Influenza A virus
gugaugaaacggaaacggg

SEQ ID NO: 6148 - RNA, 19 nt, Influenza A virus
guaaugaaacgaaaaaggg

SEQ ID NO: 6149 - RNA, 19 nt, Influenza A virus
guaaugaaacgaaaacgag

SEQ ID NO: 6150 - RNA, 19 nt, Influenza A virus
guaaugaaacgaaaacgga

SEQ ID NO: 6151 - RNA, 19 nt, Influenza A virus
guaaugaaacggaaacgag

SEQ ID NO: 6152 - RNA, 19 nt, Influenza A virus
guaaugaaacggaaacgga

SEQ ID NO: 6153 - RNA, 19 nt, Influenza A virus
gugaugaaacgaaaacgga

SEQ ID NO: 6154 - RNA, 19 nt, Influenza A virus
uaaugaaacggaaacggga

SEQ ID NO: 6155 - RNA, 19 nt, Influenza A virus
ugaugaaacgaaaacggga

SEQ ID NO: 6156 - RNA, 19 nt, Influenza A virus
ugaugaaacggaaacggga

SEQ ID NO: 6157 - RNA, 19 nt, Influenza A virus
uaaugaaacgaaaaaggga

SEQ ID NO: 6158 - RNA, 19 nt, Influenza A virus
uaaugaaacgaaaacgaga

SEQ ID NO: 6159 - RNA, 19 nt, Influenza A virus
uaaugaaacgaaaacggaa

SEQ ID NO: 6160 - RNA, 19 nt, Influenza A virus
uaaugaaacggaaacgaga

SEQ ID NO: 6161 - RNA, 19 nt, Influenza A virus
uaaugaaacggaaacggaa

SEQ ID NO: 6162 - RNA, 19 nt, Influenza A virus
ugaugaaacgaaaacggaa

SEQ ID NO: 6163 - RNA, 19 nt, Influenza A virus
aaugaaacggaaacgggac

SEQ ID NO: 6164 - RNA, 19 nt, Influenza A virus
gaugaaacgaaaacgggac

SEQ ID NO: 6165 - RNA, 19 nt, Influenza A virus
gaugaaacggaaacgggac

SEQ ID NO: 6166 - RNA, 19 nt, Influenza A virus
aaugaaacgaaaaagggac

SEQ ID NO: 6167 - RNA, 19 nt, Influenza A virus
aaugaaacgaaaacgagac

SEQ ID NO: 6168 - RNA, 19 nt, Influenza A virus
aaugaaacgaaaacggaac

SEQ ID NO: 6169 - RNA, 19 nt, Influenza A virus
aaugaaacggaaacgagac

SEQ ID NO: 6170 - RNA, 19 nt, Influenza A virus
aaugaaacggaaacggaac

SEQ ID NO: 6171 - RNA, 19 nt, Influenza A virus
gaugaaacgaaaacggaac

SEQ ID NO: 6172 - RNA, 19 nt, Influenza A virus
gaugaaauggaugauggcg

SEQ ID NO: 6173 - RNA, 19 nt, Influenza A virus
gaugaaguggaugauggca

SEQ ID NO: 6174 - RNA, 19 nt, Influenza A virus
ggugaaauggaugauggca

SEQ ID NO: 6175 - RNA, 19 nt, Influenza A virus
aaugaaauggaugauggca

SEQ ID NO: 6176 - RNA, 19 nt, Influenza A virus
aaugaaauggaugauggcg

SEQ ID NO: 6177 - RNA, 19 nt, Influenza A virus
aacaggcuguggauauaug

SEQ ID NO: 6178 - RNA, 19 nt, Influenza A virus
agcaagcuguggauauaug

SEQ ID NO: 6179 - RNA, 19 nt, Influenza A virus
aacaagcaguggauauaug

SEQ ID NO: 6180 - RNA, 19 nt, Influenza A virus
aacaagccguggauauaug

SEQ ID NO: 6181 - RNA, 19 nt, Influenza A virus
aacaagcuguagauauaug

SEQ ID NO: 6182 - RNA, 19 nt, Influenza A virus
aacaagcuguggacauaug

SEQ ID NO: 6183 - RNA, 19 nt, Influenza A virus
agcaagccguggauauaug

SEQ ID NO: 6184 - RNA, 19 nt, Influenza A virus
agcaagcuguagauauaug

SEQ ID NO: 6185 - RNA, 19 nt, Influenza A virus
agcaagcugugaauauaug

SEQ ID NO: 6186 - RNA, 19 nt, Influenza A virus
agcaagcuguggaaauaug

SEQ ID NO: 6187 - RNA, 19 nt, Influenza A virus
agcaagccguggguauaug

SEQ ID NO: 6188 - RNA, 19 nt, Influenza A virus
aacaagcaguagauauaug

SEQ ID NO: 6189 - RNA, 19 nt, Influenza A virus
agcaagccguggauauuug

SEQ ID NO: 6190 - RNA, 19 nt, Influenza A virus
gaacaggcuguggauauau

SEQ ID NO: 6191 - RNA, 19 nt, Influenza A virus
gagcaagcuguggauauau

SEQ ID NO: 6192 - RNA, 19 nt, Influenza A virus
gaacaagcaguggauauau

SEQ ID NO: 6193 - RNA, 19 nt, Influenza A virus
gaacaagccguggauauau

SEQ ID NO: 6194 - RNA, 19 nt, Influenza A virus
gaacaagcuguagauauau

SEQ ID NO: 6195 - RNA, 19 nt, Influenza A virus
gaacaagcuguggacauau

SEQ ID NO: 6196 - RNA, 19 nt, Influenza A virus
gagcaagccguggauauau

SEQ ID NO: 6197 - RNA, 19 nt, Influenza A virus
gagcaagcuguagauauau

SEQ ID NO: 6198 - RNA, 19 nt, Influenza A virus
gagcaagcugugaauauau

SEQ ID NO: 6199 - RNA, 19 nt, Influenza A virus
gagcaagcuguggaaauau

SEQ ID NO: 6200 - RNA, 19 nt, Influenza A virus
gagcaagccguggguauau

SEQ ID NO: 6201 - RNA, 19 nt, Influenza A virus
gaacaagcaguagauauau

SEQ ID NO: 6202 - RNA, 19 nt, Influenza A virus
gagcaagccguggauauuu

SEQ ID NO: 6203 - RNA, 19 nt, Influenza A virus
acaagcuguggauauaugu

SEQ ID NO: 6204 - RNA, 19 nt, Influenza A virus
acaggcuguggauauaugc

SEQ ID NO: 6205 - RNA, 19 nt, Influenza A virus
gcaagcuguggauauaugc

SEQ ID NO: 6206 - RNA, 19 nt, Influenza A virus
acaagcaguggauauaugc

SEQ ID NO: 6207 - RNA, 19 nt, Influenza A virus
acaagccguggauauaugc

SEQ ID NO: 6208 - RNA, 19 nt, Influenza A virus
acaagcuguagauauaugc

SEQ ID NO: 6209 - RNA, 19 nt, Influenza A virus
acaagcuguggacauaugc

SEQ ID NO: 6210 - RNA, 19 nt, Influenza A virus
acaagccguggauauaugu

SEQ ID NO: 6211 - RNA, 19 nt, Influenza A virus
gcaagccguggauauaugc

SEQ ID NO: 6212 - RNA, 19 nt, Influenza A virus
gcaagcuguagauauaugc

SEQ ID NO: 6213 - RNA, 19 nt, Influenza A virus
gcaagcugugaauauaugc

SEQ ID NO: 6214 - RNA, 19 nt, Influenza A virus
gcaagcuguggaaauaugc

SEQ ID NO: 6215 - RNA, 19 nt, Influenza A virus
gcaagccguggguauaugc

SEQ ID NO: 6216 - RNA, 19 nt, Influenza A virus
acaagcaguagauauaugc

SEQ ID NO: 6217 - RNA, 19 nt, Influenza A virus
gcaagccguggauauuugc

SEQ ID NO: 6218 - RNA, 19 nt, Influenza A virus
uguacacuccaggugggga

SEQ ID NO: 6219 - RNA, 19 nt, Influenza A virus
uguacacaccagguggaga

SEQ ID NO: 6220 - RNA, 19 nt, Influenza A virus
uguacaccccagguggaga

SEQ ID NO: 6221 - RNA, 19 nt, Influenza A virus
uguacacgccagguggaga

SEQ ID NO: 6222 - RNA, 19 nt, Influenza A virus
uguacacuccaggcggaga

SEQ ID NO: 6223 - RNA, 19 nt, Influenza A virus
uguacacuccagguggcga

SEQ ID NO: 6224 - RNA, 19 nt, Influenza A virus
uguacacucccgguggaga

SEQ ID NO: 6225 - RNA, 19 nt, Influenza A virus
aguacacuccaggugggga

SEQ ID NO: 6226 - RNA, 19 nt, Influenza A virus
uguacacuccaggagggga

SEQ ID NO: 6227 - RNA, 19 nt, Influenza A virus
uguacacuccaggcgggga

SEQ ID NO: 6228 - RNA, 19 nt, Influenza A virus
uguauacuccaggagggga

SEQ ID NO: 6229 - RNA, 19 nt, Influenza A virus
uguacacaccaggagggga

SEQ ID NO: 6230 - RNA, 19 nt, Influenza A virus
auguacacuccaggugggg

SEQ ID NO: 6231 - RNA, 19 nt, Influenza A virus
auguacacaccagguggag

SEQ ID NO: 6232 - RNA, 19 nt, Influenza A virus
auguacaccccagguggag

SEQ ID NO: 6233 - RNA, 19 nt, Influenza A virus
auguacacgccagguggag

SEQ ID NO: 6234 - RNA, 19 nt, Influenza A virus
auguacacuccaggcggag

SEQ ID NO: 6235 - RNA, 19 nt, Influenza A virus
auguacacuccagguggcg

SEQ ID NO: 6236 - RNA, 19 nt, Influenza A virus
auguacacucccgguggag

SEQ ID NO: 6237 - RNA, 19 nt, Influenza A virus
aaguacacuccaggugggg

SEQ ID NO: 6238 - RNA, 19 nt, Influenza A virus
auguacacuccaggagggg

SEQ ID NO: 6239 - RNA, 19 nt, Influenza A virus
auguacacuccaggcgggg

SEQ ID NO: 6240 - RNA, 19 nt, Influenza A virus
auguauacuccaggagggg

SEQ ID NO: 6241 - RNA, 19 nt, Influenza A virus
auguacacaccaggagggg

SEQ ID NO: 6242 - RNA, 19 nt, Influenza A virus
auguacacgccaggagggg

SEQ ID NO: 6243 - RNA, 19 nt, Influenza A virus
augaugaugggcauguuua

SEQ ID NO: 6244 - RNA, 19 nt, Influenza A virus
augaugauggguauguuca

SEQ ID NO: 6245 - RNA, 19 nt, Influenza A virus
augaugauggguauguuua

SEQ ID NO: 6246 - RNA, 19 nt, Influenza A virus
augaugaugggaauguuca

SEQ ID NO: 6247 - RNA, 19 nt, Influenza A virus
ugaugaugggcauguuuaa

SEQ ID NO: 6248 - RNA, 19 nt, Influenza A virus
ugaugauggguauguucaa

SEQ ID NO: 6249 - RNA, 19 nt, Influenza A virus
ugaugauggguauguuuaa

SEQ ID NO: 6250 - RNA, 19 nt, Influenza A virus
ugaugaugggaauguucaa

SEQ ID NO: 6251 - RNA, 19 nt, Influenza A virus
aucuguuucaccauugaag

SEQ ID NO: 6252 - RNA, 19 nt, Influenza A virus
accuguuccaccauugaag

SEQ ID NO: 6253 - RNA, 19 nt, Influenza A virus
aucugcuccaccauugaag

SEQ ID NO: 6254 - RNA, 19 nt, Influenza A virus
aucuguuacaccauugaag

SEQ ID NO: 6255 - RNA, 19 nt, Influenza A virus
aucuguuccaccauuaaag

SEQ ID NO: 6256 - RNA, 19 nt, Influenza A virus
accuguucuaccauugaag

SEQ ID NO: 6257 - RNA, 19 nt, Influenza A virus
accugcuccaccauugaag

SEQ ID NO: 6258 - RNA, 19 nt, Influenza A virus
ucuguuucaccauugaaga

SEQ ID NO: 6259 - RNA, 19 nt, Influenza A virus
ccuguuccaccauugaaga

SEQ ID NO: 6260 - RNA, 19 nt, Influenza A virus
ucugcuccaccauugaaga

SEQ ID NO: 6261 - RNA, 19 nt, Influenza A virus
ucuguuacaccauugaaga

SEQ ID NO: 6262 - RNA, 19 nt, Influenza A virus
ucuguuccaccauuaaaga

SEQ ID NO: 6263 - RNA, 19 nt, Influenza A virus
ccuguucuaccauugaaga

SEQ ID NO: 6264 - RNA, 19 nt, Influenza A virus
ccugcuccaccauugaaga

SEQ ID NO: 6265 - RNA, 19 nt, Influenza A virus
gaucuguuucaccauugaa

SEQ ID NO: 6266 - RNA, 19 nt, Influenza A virus
aaucuguuccaccauugaa

SEQ ID NO: 6267 - RNA, 19 nt, Influenza A virus
gaccuguuccaccauugaa

SEQ ID NO: 6268 - RNA, 19 nt, Influenza A virus
gaucugcuccaccauugaa

SEQ ID NO: 6269 - RNA, 19 nt, Influenza A virus
gaucuguuacaccauugaa

SEQ ID NO: 6270 - RNA, 19 nt, Influenza A virus
gaucuguuccaccauuaaa

SEQ ID NO: 6271 - RNA, 19 nt, Influenza A virus
gaccuguucuaccauugaa

SEQ ID NO: 6272 - RNA, 19 nt, Influenza A virus
gaccugcuccaccauugaa

SEQ ID NO: 6273 - RNA, 19 nt, Influenza A virus
gaagaucuguuucaccauu

SEQ ID NO: 6274 - RNA, 19 nt, Influenza A virus
gaggaucuguuccaccauu

SEQ ID NO: 6275 - RNA, 19 nt, Influenza A virus
gaaaaucuguuccaccauu

SEQ ID NO: 6276 - RNA, 19 nt, Influenza A virus
gaagaccuguuccaccauu

SEQ ID NO: 6277 - RNA, 19 nt, Influenza A virus
gaagaucugcuccaccauu

SEQ ID NO: 6278 - RNA, 19 nt, Influenza A virus
gaagaucuguuacaccauu

SEQ ID NO: 6279 - RNA, 19 nt, Influenza A virus
gaagaccuguucuaccauu

SEQ ID NO: 6280 - RNA, 19 nt, Influenza A virus
aaagaccuguuccaccauu

SEQ ID NO: 6281 - RNA, 19 nt, Influenza A virus
gaagaccugcuccaccauu

SEQ ID NO: 6282 - RNA, 19 nt, Influenza A virus
aagaucuguuucaccauug

SEQ ID NO: 6283 - RNA, 19 nt, Influenza A virus
aggaucuguuccaccauug

SEQ ID NO: 6284 - RNA, 19 nt, Influenza A virus
aaaaucuguuccaccauug

SEQ ID NO: 6285 - RNA, 19 nt, Influenza A virus
aagaccuguuccaccauug

SEQ ID NO: 6286 - RNA, 19 nt, Influenza A virus
aagaucugcuccaccauug

SEQ ID NO: 6287 - RNA, 19 nt, Influenza A virus
aagaucuguuacaccauug

SEQ ID NO: 6288 - RNA, 19 nt, Influenza A virus
aagaucuguuccaccauua

SEQ ID NO: 6289 - RNA, 19 nt, Influenza A virus
aagaccuguucuaccauug

SEQ ID NO: 6290 - RNA, 19 nt, Influenza A virus
aagaccugcuccaccauug

SEQ ID NO: 6291 - RNA, 19 nt, Influenza A virus
ugaagaucuguuucaccau

SEQ ID NO: 6292 - RNA, 19 nt, Influenza A virus
ugaggaucuguuccaccau

SEQ ID NO: 6293 - RNA, 19 nt, Influenza A virus
cgaagaucuguuccaccau

SEQ ID NO: 6294 - RNA, 19 nt, Influenza A virus
ugaaaaucuguuccaccau

SEQ ID NO: 6295 - RNA, 19 nt, Influenza A virus
ugaagaccuguuccaccau

SEQ ID NO: 6296 - RNA, 19 nt, Influenza A virus
ugaagaucugcuccaccau

SEQ ID NO: 6297 - RNA, 19 nt, Influenza A virus
ugaagaucuguuacaccau

SEQ ID NO: 6298 - RNA, 19 nt, Influenza A virus
ugaagaccuguucuaccau

SEQ ID NO: 6299 - RNA, 19 nt, Influenza A virus
uaaagaccuguuccaccau

SEQ ID NO: 6300 - RNA, 19 nt, Influenza A virus
ugaagaccugcuccaccau

SEQ ID NO: 6301 - RNA, 19 nt, Influenza A virus
agaucuguuucaccauuga

SEQ ID NO: 6302 - RNA, 19 nt, Influenza A virus
ggaucuguuccaccauuga

SEQ ID NO: 6303 - RNA, 19 nt, Influenza A virus
aaaucuguuccaccauuga

SEQ ID NO: 6304 - RNA, 19 nt, Influenza A virus
agaccuguuccaccauuga

SEQ ID NO: 6305 - RNA, 19 nt, Influenza A virus
agaucugcuccaccauuga

SEQ ID NO: 6306 - RNA, 19 nt, Influenza A virus
agaucuguuacaccauuga

SEQ ID NO: 6307 - RNA, 19 nt, Influenza A virus
agaucuguuccaccauuaa

SEQ ID NO: 6308 - RNA, 19 nt, Influenza A virus
agaccuguucuaccauuga

SEQ ID NO: 6309 - RNA, 19 nt, Influenza A virus
agaccugcuccaccauuga

SEQ ID NO: 6310 - RNA, 19 nt, Influenza A virus
ugauaaacaaugaucuugg

SEQ ID NO: 6311 - RNA, 19 nt, Influenza A virus
ugauaaauaaugaccuugg

SEQ ID NO: 6312 - RNA, 19 nt, Influenza A virus
ugguaaacaaugaccuugg

SEQ ID NO: 6313 - RNA, 19 nt, Influenza A virus
ugauaaacaacgaccuugg

SEQ ID NO: 6314 - RNA, 19 nt, Influenza A virus
ugauaaacaaugaccuagg

SEQ ID NO: 6315 - RNA, 19 nt, Influenza A virus
augauaaacaaugaucuug

SEQ ID NO: 6316 - RNA, 19 nt, Influenza A virus
augauaaauaaugaccuug

SEQ ID NO: 6317 - RNA, 19 nt, Influenza A virus
augguaaacaaugaccuug

SEQ ID NO: 6318 - RNA, 19 nt, Influenza A virus
augauaaacaacgaccuug

SEQ ID NO: 6319 - RNA, 19 nt, Influenza A virus
augauaaacaaugaccuag

SEQ ID NO: 6320 - RNA, 19 nt, Influenza A virus
ccauacagccauggaacgg

SEQ ID NO: 6321 - RNA, 19 nt, Influenza A virus
ccauacagccaugggacag

SEQ ID NO: 6322 - RNA, 19 nt, Influenza A virus
ccauacagucauggaacag

SEQ ID NO: 6323 - RNA, 19 nt, Influenza A virus
ccauauagccauggaacag

SEQ ID NO: 6324 - RNA, 19 nt, Influenza A virus
ccuuacagccauggaacag

SEQ ID NO: 6325 - RNA, 19 nt, Influenza A virus
cccuacagccaugggacag

SEQ ID NO: 6326 - RNA, 19 nt, Influenza A virus
ccuuacagccaugggacag

SEQ ID NO: 6327 - RNA, 19 nt, Influenza A virus
ccuuacagucauggaacag

SEQ ID NO: 6328 - RNA, 19 nt, Influenza A virus
cauacagccauggaacggg

SEQ ID NO: 6329 - RNA, 19 nt, Influenza A virus
cauacagccaugggacagg

SEQ ID NO: 6330 - RNA, 19 nt, Influenza A virus
cauacagucauggaacagg

SEQ ID NO: 6331 - RNA, 19 nt, Influenza A virus
cauauagccauggaacagg

SEQ ID NO: 6332 - RNA, 19 nt, Influenza A virus
cuuacagccauggaacagg

SEQ ID NO: 6333 - RNA, 19 nt, Influenza A virus
ccuacagccaugggacagg

SEQ ID NO: 6334 - RNA, 19 nt, Influenza A virus
cuuacagccaugggacagg

SEQ ID NO: 6335 - RNA, 19 nt, Influenza A virus
cuuacagucauggaacagg

SEQ ID NO: 6336 - RNA, 19 nt, Influenza A virus
gaggccauggugucugggg

SEQ ID NO: 6337 - RNA, 19 nt, Influenza A virus
gaagccauggugucuaggg

SEQ ID NO: 6338 - RNA, 19 nt, Influenza A virus
gaggcaauggugucuaggg

SEQ ID NO: 6339 - RNA, 19 nt, Influenza A virus
gaggccaugaugucuaggg

SEQ ID NO: 6340 - RNA, 19 nt, Influenza A virus
gaggccaugguaucuaggg

SEQ ID NO: 6341 - RNA, 19 nt, Influenza A virus
gaggccauggugucuaagg

SEQ ID NO: 6342 - RNA, 19 nt, Influenza A virus
gaggccauggugucuagag

SEQ ID NO: 6343 - RNA, 19 nt, Influenza A virus
gaggccauggugucucggg

SEQ ID NO: 6344 - RNA, 19 nt, Influenza A virus
gaggccaugguuucuaggg

SEQ ID NO: 6345 - RNA, 19 nt, Influenza A virus
gaggccaugguaucuagga

SEQ ID NO: 6346 - RNA, 19 nt, Influenza A virus
gaggccaugguuuccaggg

SEQ ID NO: 6347 - RNA, 19 nt, Influenza A virus
aggccauggugucuggggc

SEQ ID NO: 6348 - RNA, 19 nt, Influenza A virus
aagccauggugucuagggc

SEQ ID NO: 6349 - RNA, 19 nt, Influenza A virus
aggcaauggugucuagggc

SEQ ID NO: 6350 - RNA, 19 nt, Influenza A virus
aggccaugaugucuagggc

SEQ ID NO: 6351 - RNA, 19 nt, Influenza A virus
aggccaugguaucuagggc

SEQ ID NO: 6352 - RNA, 19 nt, Influenza A virus
aggccauggugucuaaggc

SEQ ID NO: 6353 - RNA, 19 nt, Influenza A virus
aggccauggugucuagagc

SEQ ID NO: 6354 - RNA, 19 nt, Influenza A virus
aggccauggugucucgggc

SEQ ID NO: 6355 - RNA, 19 nt, Influenza A virus
aggccaugguuucuagggc

SEQ ID NO: 6356 - RNA, 19 nt, Influenza A virus
aggccaugguaucuaggac

SEQ ID NO: 6357 - RNA, 19 nt, Influenza A virus
aggccaugguuuccagggc

SEQ ID NO: 6358 - RNA, 19 nt, Influenza A virus
ggaggccauggugucuggg

SEQ ID NO: 6359 - RNA, 19 nt, Influenza A virus
ggaggcaauggugucuagg

SEQ ID NO: 6360 - RNA, 19 nt, Influenza A virus
ggaggccaugaugucuagg

SEQ ID NO: 6361 - RNA, 19 nt, Influenza A virus
ggaggccaugguaucuagg

SEQ ID NO: 6362 - RNA, 19 nt, Influenza A virus
ggaggccauggugucuaag

SEQ ID NO: 6363 - RNA, 19 nt, Influenza A virus
ggaggccauggugucuaga

SEQ ID NO: 6364 - RNA, 19 nt, Influenza A virus
ggaggccauggugucucgg

SEQ ID NO: 6365 - RNA, 19 nt, Influenza A virus
ggaggccaugguuucuagg

SEQ ID NO: 6366 - RNA, 19 nt, Influenza A virus
ugaggccauggugucuagg

SEQ ID NO: 6367 - RNA, 19 nt, Influenza A virus
ggaggccaugguuuccagg

SEQ ID NO: 6368 - RNA, 19 nt, Influenza A virus
ugaagccauggugucuagg

SEQ ID NO: 6369 - RNA, 19 nt, Influenza A virus
uggaggccauggugucugg

SEQ ID NO: 6370 - RNA, 19 nt, Influenza A virus
gggaggccauggugucuag

SEQ ID NO: 6371 - RNA, 19 nt, Influenza A virus
uggaggcaauggugucuag

SEQ ID NO: 6372 - RNA, 19 nt, Influenza A virus
uggaggccaugaugucuag

SEQ ID NO: 6373 - RNA, 19 nt, Influenza A virus
uggaggccaugguaucuag

SEQ ID NO: 6374 - RNA, 19 nt, Influenza A virus
uggaggccauggugucuaa

SEQ ID NO: 6375 - RNA, 19 nt, Influenza A virus
uggaggccauggugucucg

SEQ ID NO: 6376 - RNA, 19 nt, Influenza A virus
uggaggccaugguuucuag

SEQ ID NO: 6377 - RNA, 19 nt, Influenza A virus
uugaggccauggugucuag

SEQ ID NO: 6378 - RNA, 19 nt, Influenza A virus
uggaggccaugguuuccag

SEQ ID NO: 6379 - RNA, 19 nt, Influenza A virus
uugaagccauggugucuag

SEQ ID NO: 6380 - RNA, 19 nt, Influenza A virus
uggaggcuaugguaucaag

SEQ ID NO: 6381 - RNA, 19 nt, Influenza A virus
uggaggcuaugguuucaag

SEQ ID NO: 6382 - RNA, 19 nt, Influenza A virus
uggaggcuaugguuuccag

SEQ ID NO: 6383 - RNA, 19 nt, Influenza A virus
gagaucaugaggaucuguu

SEQ ID NO: 6384 - RNA, 19 nt, Influenza A virus
gaaaucaugaagaucuguu

SEQ ID NO: 6385 - RNA, 19 nt, Influenza A virus
gagaccaugaagaucuguu

SEQ ID NO: 6386 - RNA, 19 nt, Influenza A virus
gagaucacgaagaucuguu

SEQ ID NO: 6387 - RNA, 19 nt, Influenza A virus
gagaucaugaaaaucuguu

SEQ ID NO: 6388 - RNA, 19 nt, Influenza A virus
gagaucaugaagaccuguu

SEQ ID NO: 6389 - RNA, 19 nt, Influenza A virus
gagaucaugaagaucugcu

SEQ ID NO: 6390 - RNA, 19 nt, Influenza A virus
gagauccugaagaucuguu

SEQ ID NO: 6391 - RNA, 19 nt, Influenza A virus
gagaucuugaagaucuguu

SEQ ID NO: 6392 - RNA, 19 nt, Influenza A virus
gagaucauaaagaccuguu

SEQ ID NO: 6393 - RNA, 19 nt, Influenza A virus
gagaucaugaagaccugcu

SEQ ID NO: 6394 - RNA, 19 nt, Influenza A virus
accaagaaaauggucacgc

SEQ ID NO: 6395 - RNA, 19 nt, Influenza A virus
accaagaaaaugguuacac

SEQ ID NO: 6396 - RNA, 19 nt, Influenza A virus
accaagaagauggucacac

SEQ ID NO: 6397 - RNA, 19 nt, Influenza A virus
accaagagaauggucacac

SEQ ID NO: 6398 - RNA, 19 nt, Influenza A virus
accaaaaaaauggucacac

SEQ ID NO: 6399 - RNA, 19 nt, Influenza A virus
accaagaaaaugaucacac

SEQ ID NO: 6400 - RNA, 19 nt, Influenza A virus
accaagaaaauggucaccc

SEQ ID NO: 6401 - RNA, 19 nt, Influenza A virus
accaagaauauggucacac

SEQ ID NO: 6402 - RNA, 19 nt, Influenza A virus
acccagaaaauggucacac

SEQ ID NO: 6403 - RNA, 19 nt, Influenza A virus
accaaaaagauggucacac

SEQ ID NO: 6404 - RNA, 19 nt, Influenza A virus
accaagagaauggucacuc

SEQ ID NO: 6405 - RNA, 19 nt, Influenza A virus
acuaagaaaauggugacac

SEQ ID NO: 6406 - RNA, 19 nt, Influenza A virus
acuaagaaaauggugacgc

SEQ ID NO: 6407 - RNA, 19 nt, Influenza A virus
accaaaaaaaugguaacac

SEQ ID NO: 6408 - RNA, 19 nt, Influenza A virus
accaaaaaaauggugacac

SEQ ID NO: 6409 - RNA, 19 nt, Influenza A virus
acuaaaaaaauggugacac

SEQ ID NO: 6410 - RNA, 19 nt, Influenza A virus
acuaagaaaaugauaacac

SEQ ID NO: 6411 - RNA, 19 nt, Influenza A virus
ccaagaaaauggucacgca

SEQ ID NO: 6412 - RNA, 19 nt, Influenza A virus
ccaagaaaaugguuacaca

SEQ ID NO: 6413 - RNA, 19 nt, Influenza A virus
ccaagaagauggucacaca

SEQ ID NO: 6414 - RNA, 19 nt, Influenza A virus
ccaagagaauggucacaca

SEQ ID NO: 6415 - RNA, 19 nt, Influenza A virus
ccaaaaaaauggucacaca

SEQ ID NO: 6416 - RNA, 19 nt, Influenza A virus
ccaagaaaaugaucacaca

SEQ ID NO: 6417 - RNA, 19 nt, Influenza A virus
ccaagaaaauggucaccca

SEQ ID NO: 6418 - RNA, 19 nt, Influenza A virus
ccaagaauauggucacaca

SEQ ID NO: 6419 - RNA, 19 nt, Influenza A virus
cccagaaaauggucacaca

SEQ ID NO: 6420 - RNA, 19 nt, Influenza A virus
ccaaaaagauggucacaca

SEQ ID NO: 6421 - RNA, 19 nt, Influenza A virus
ccaagagaauggucacuca

SEQ ID NO: 6422 - RNA, 19 nt, Influenza A virus
cuaagaaaauggugacaca

SEQ ID NO: 6423 - RNA, 19 nt, Influenza A virus
cuaagaaaauggugacgca

SEQ ID NO: 6424 - RNA, 19 nt, Influenza A virus
ccaaaaaaaugguaacaca

SEQ ID NO: 6425 - RNA, 19 nt, Influenza A virus
ccaaaaaaauggugacaca

SEQ ID NO: 6426 - RNA, 19 nt, Influenza A virus
cuaaaaaaauggugacaca

SEQ ID NO: 6427 - RNA, 19 nt, Influenza A virus
cuaagaaaaugauaacaca

SEQ ID NO: 6428 - RNA, 19 nt, Influenza A virus
ugaccaagaaaaugguuac

SEQ ID NO: 6429 - RNA, 19 nt, Influenza A virus
ugaccaagaagauggucac

SEQ ID NO: 6430 - RNA, 19 nt, Influenza A virus
ugaccaagagaauggucac

SEQ ID NO: 6431 - RNA, 19 nt, Influenza A virus
uaaccaagaaaauggucac

SEQ ID NO: 6432 - RNA, 19 nt, Influenza A virus
ugaccaaaaaaauggucac

SEQ ID NO: 6433 - RNA, 19 nt, Influenza A virus
ugaccaagaaaaugaucac

SEQ ID NO: 6434 - RNA, 19 nt, Influenza A virus
ugaccaagaauauggucac

SEQ ID NO: 6435 - RNA, 19 nt, Influenza A virus
ugacccagaaaauggucac

SEQ ID NO: 6436 - RNA, 19 nt, Influenza A virus
uuaccaagaaaauggucac

SEQ ID NO: 6437 - RNA, 19 nt, Influenza A virus
ugaccaaaaagauggucac

SEQ ID NO: 6438 - RNA, 19 nt, Influenza A virus
ugacuaagaaaauggugac

SEQ ID NO: 6439 - RNA, 19 nt, Influenza A virus
ugaccaaaaaaaugguaac

SEQ ID NO: 6440 - RNA, 19 nt, Influenza A virus
ugacuaagaaaaugauaac

SEQ ID NO: 6441 - RNA, 19 nt, Influenza A virus
augaccaagaaaaugguua

SEQ ID NO: 6442 - RNA, 19 nt, Influenza A virus
augaccaagaagaugguca

SEQ ID NO: 6443 - RNA, 19 nt, Influenza A virus
augaccaagagaaugguca

SEQ ID NO: 6444 - RNA, 19 nt, Influenza A virus
auaaccaagaaaaugguca

SEQ ID NO: 6445 - RNA, 19 nt, Influenza A virus
augaccaaaaaaaugguca

SEQ ID NO: 6446 - RNA, 19 nt, Influenza A virus
augaccaagaaaaugauca

SEQ ID NO: 6447 - RNA, 19 nt, Influenza A virus
augaccaagaauaugguca

SEQ ID NO: 6448 - RNA, 19 nt, Influenza A virus
augacccagaaaaugguca

SEQ ID NO: 6449 - RNA, 19 nt, Influenza A virus
auuaccaagaaaaugguca

SEQ ID NO: 6450 - RNA, 19 nt, Influenza A virus
augaccaaaaagaugguca

SEQ ID NO: 6451 - RNA, 19 nt, Influenza A virus
augacuaagaaaaugguga

SEQ ID NO: 6452 - RNA, 19 nt, Influenza A virus
gugacuaagaaaaugguga

SEQ ID NO: 6453 - RNA, 19 nt, Influenza A virus
augaccaaaaaaaugguaa

SEQ ID NO: 6454 - RNA, 19 nt, Influenza A virus
augacuaagaaaaugauaa

SEQ ID NO: 6455 - RNA, 19 nt, Influenza A virus
caugaagaucuguuucacc

SEQ ID NO: 6456 - RNA, 19 nt, Influenza A virus
caugaggaucuguuccacc

SEQ ID NO: 6457 - RNA, 19 nt, Influenza A virus
cacgaagaucuguuccacc

SEQ ID NO: 6458 - RNA, 19 nt, Influenza A virus
caugaaaaucuguuccacc

SEQ ID NO: 6459 - RNA, 19 nt, Influenza A virus
caugaagaccuguuccacc

SEQ ID NO: 6460 - RNA, 19 nt, Influenza A virus
caugaagaucugcuccacc

SEQ ID NO: 6461 - RNA, 19 nt, Influenza A virus
caugaagaucuguuacacc

SEQ ID NO: 6462 - RNA, 19 nt, Influenza A virus
ccugaagaucuguuccacc

SEQ ID NO: 6463 - RNA, 19 nt, Influenza A virus
cuugaagaucuguuccacc

SEQ ID NO: 6464 - RNA, 19 nt, Influenza A virus
caugaagaccuguucuacc

SEQ ID NO: 6465 - RNA, 19 nt, Influenza A virus
cauaaagaccuguuccacc

SEQ ID NO: 6466 - RNA, 19 nt, Influenza A virus
caugaagaccugcuccacc

SEQ ID NO: 6467 - RNA, 19 nt, Influenza A virus
augaagaucuguuucacca

SEQ ID NO: 6468 - RNA, 19 nt, Influenza A virus
augaggaucuguuccacca

SEQ ID NO: 6469 - RNA, 19 nt, Influenza A virus
acgaagaucuguuccacca

SEQ ID NO: 6470 - RNA, 19 nt, Influenza A virus
augaaaaucuguuccacca

SEQ ID NO: 6471 - RNA, 19 nt, Influenza A virus
augaagaccuguuccacca

SEQ ID NO: 6472 - RNA, 19 nt, Influenza A virus
augaagaucugcuccacca

SEQ ID NO: 6473 - RNA, 19 nt, Influenza A virus
augaagaucuguuacacca

SEQ ID NO: 6474 - RNA, 19 nt, Influenza A virus
cugaagaucuguuccacca

SEQ ID NO: 6475 - RNA, 19 nt, Influenza A virus
uugaagaucuguuccacca

SEQ ID NO: 6476 - RNA, 19 nt, Influenza A virus
augaagaccuguucuacca

SEQ ID NO: 6477 - RNA, 19 nt, Influenza A virus
auaaagaccuguuccacca

SEQ ID NO: 6478 - RNA, 19 nt, Influenza A virus
augaagaccugcuccacca

SEQ ID NO: 6479 - RNA, 19 nt, Influenza A virus
caagaaaauggucacacag

SEQ ID NO: 6480 - RNA, 19 nt, Influenza A virus
caagaaaauggucacgcaa

SEQ ID NO: 6481 - RNA, 19 nt, Influenza A virus
caagaaaaugguuacacaa

SEQ ID NO: 6482 - RNA, 19 nt, Influenza A virus
caagaagauggucacacaa

SEQ ID NO: 6483 - RNA, 19 nt, Influenza A virus
caagagaauggucacacaa

SEQ ID NO: 6484 - RNA, 19 nt, Influenza A virus
caaaaaaauggucacacaa

SEQ ID NO: 6485 - RNA, 19 nt, Influenza A virus
caagaaaaugaucacacaa

SEQ ID NO: 6486 - RNA, 19 nt, Influenza A virus
caagaaaauggucacccaa

SEQ ID NO: 6487 - RNA, 19 nt, Influenza A virus
caagaauauggucacacaa

SEQ ID NO: 6488 - RNA, 19 nt, Influenza A virus
ccagaaaauggucacacaa

SEQ ID NO: 6489 - RNA, 19 nt, Influenza A virus
caaaaagauggucacacaa

SEQ ID NO: 6490 - RNA, 19 nt, Influenza A virus
caagagaauggucacucaa

SEQ ID NO: 6491 - RNA, 19 nt, Influenza A virus
uaagaaaauggugacacaa

SEQ ID NO: 6492 - RNA, 19 nt, Influenza A virus
uaagaaaauggugacacag

SEQ ID NO: 6493 - RNA, 19 nt, Influenza A virus
uaagaaaauggugacgcaa

SEQ ID NO: 6494 - RNA, 19 nt, Influenza A virus
caaaaaaauggugacacaa

SEQ ID NO: 6495 - RNA, 19 nt, Influenza A virus
caaaaaaaugguaacacag

SEQ ID NO: 6496 - RNA, 19 nt, Influenza A virus
uaaaaaaauggugacacaa

SEQ ID NO: 6497 - RNA, 19 nt, Influenza A virus
ucaugaagaucuguuucac

SEQ ID NO: 6498 - RNA, 19 nt, Influenza A virus
ucaugaggaucuguuccac

SEQ ID NO: 6499 - RNA, 19 nt, Influenza A virus
ccaugaagaucuguuccac

SEQ ID NO: 6500 - RNA, 19 nt, Influenza A virus
ucacgaagaucuguuccac

SEQ ID NO: 6501 - RNA, 19 nt, Influenza A virus
ucaugaaaaucuguuccac

SEQ ID NO: 6502 - RNA, 19 nt, Influenza A virus
ucaugaagaccuguuccac

SEQ ID NO: 6503 - RNA, 19 nt, Influenza A virus
ucaugaagaucugcuccac

SEQ ID NO: 6504 - RNA, 19 nt, Influenza A virus
ucaugaagaucuguuacac

SEQ ID NO: 6505 - RNA, 19 nt, Influenza A virus
uccugaagaucuguuccac

SEQ ID NO: 6506 - RNA, 19 nt, Influenza A virus
ucuugaagaucuguuccac

SEQ ID NO: 6507 - RNA, 19 nt, Influenza A virus
ucaugaagaccuguucuac

SEQ ID NO: 6508 - RNA, 19 nt, Influenza A virus
ucauaaagaccuguuccac

SEQ ID NO: 6509 - RNA, 19 nt, Influenza A virus
ucaugaagaccugcuccac

SEQ ID NO: 6510 - RNA, 19 nt, Influenza A virus
aucaugaagaucuguuuca

SEQ ID NO: 6511 - RNA, 19 nt, Influenza A virus
aucaugaggaucuguucca

SEQ ID NO: 6512 - RNA, 19 nt, Influenza A virus
accaugaagaucuguucca

SEQ ID NO: 6513 - RNA, 19 nt, Influenza A virus
aucacgaagaucuguucca

SEQ ID NO: 6514 - RNA, 19 nt, Influenza A virus
aucaugaaaaucuguucca

SEQ ID NO: 6515 - RNA, 19 nt, Influenza A virus
aucaugaagaccuguucca

SEQ ID NO: 6516 - RNA, 19 nt, Influenza A virus
aucaugaagaucugcucca

SEQ ID NO: 6517 - RNA, 19 nt, Influenza A virus
aucaugaagaucuguuaca

SEQ ID NO: 6518 - RNA, 19 nt, Influenza A virus
auccugaagaucuguucca

SEQ ID NO: 6519 - RNA, 19 nt, Influenza A virus
aucuugaagaucuguucca

SEQ ID NO: 6520 - RNA, 19 nt, Influenza A virus
aucaugaagaccuguucua

SEQ ID NO: 6521 - RNA, 19 nt, Influenza A virus
aucauaaagaccuguucca

SEQ ID NO: 6522 - RNA, 19 nt, Influenza A virus
aucaugaagaccugcucca

SEQ ID NO: 6523 - RNA, 19 nt, Influenza A virus
gaugggcauguucaauaug

SEQ ID NO: 6524 - RNA, 19 nt, Influenza A virus
gaugggcauguuuaacaug

SEQ ID NO: 6525 - RNA, 19 nt, Influenza A virus
gauggguauguucaacaug

SEQ ID NO: 6526 - RNA, 19 nt, Influenza A virus
gaugggcauguuuaauaug

SEQ ID NO: 6527 - RNA, 19 nt, Influenza A virus
gauggguauguucaauaug

SEQ ID NO: 6528 - RNA, 19 nt, Influenza A virus
gauggguauguuuaauaug

SEQ ID NO: 6529 - RNA, 19 nt, Influenza A virus
gaugggaauguucaacaug

SEQ ID NO: 6530 - RNA, 19 nt, Influenza A virus
ugaugggcauguucaauau

SEQ ID NO: 6531 - RNA, 19 nt, Influenza A virus
ugaugggcauguuuaacau

SEQ ID NO: 6532 - RNA, 19 nt, Influenza A virus
ugauggguauguucaacau

SEQ ID NO: 6533 - RNA, 19 nt, Influenza A virus
ugaugggcauguuuaauau

SEQ ID NO: 6534 - RNA, 19 nt, Influenza A virus
ugauggguauguucaauau

SEQ ID NO: 6535 - RNA, 19 nt, Influenza A virus
ugauggguauguuuaauau

SEQ ID NO: 6536 - RNA, 19 nt, Influenza A virus
ugaugggaauguucaacau

SEQ ID NO: 6537 - RNA, 19 nt, Influenza A virus
augaggggauacaagcagg

SEQ ID NO: 6538 - RNA, 19 nt, Influenza A virus
acgagggaauacaagcagg

SEQ ID NO: 6539 - RNA, 19 nt, Influenza A virus
auaagggaauacaagcagg

SEQ ID NO: 6540 - RNA, 19 nt, Influenza A virus
augaaggaauacaagcagg

SEQ ID NO: 6541 - RNA, 19 nt, Influenza A virus
augagggaauacaaucagg

SEQ ID NO: 6542 - RNA, 19 nt, Influenza A virus
augauggaauacaagcagg

SEQ ID NO: 6543 - RNA, 19 nt, Influenza A virus
augagggaauucaagccgg

SEQ ID NO: 6544 - RNA, 19 nt, Influenza A virus
augaagggauucaagcagg

SEQ ID NO: 6545 - RNA, 19 nt, Influenza A virus
acaugaccaagaagauggu

SEQ ID NO: 6546 - RNA, 19 nt, Influenza A virus
acaugaccaagagaauggu

SEQ ID NO: 6547 - RNA, 19 nt, Influenza A virus
acaugacuaagaaaauggu

SEQ ID NO: 6548 - RNA, 19 nt, Influenza A virus
auaugaccaagaaaauggu

SEQ ID NO: 6549 - RNA, 19 nt, Influenza A virus
auaugacuaagaaaauggu

SEQ ID NO: 6550 - RNA, 19 nt, Influenza A virus
augugacuaagaaaauggu

SEQ ID NO: 6551 - RNA, 19 nt, Influenza A virus
acauaaccaagaaaauggu

SEQ ID NO: 6552 - RNA, 19 nt, Influenza A virus
acaugaccaaaaaaauggu

SEQ ID NO: 6553 - RNA, 19 nt, Influenza A virus
acaugaccaagaaaaugau

SEQ ID NO: 6554 - RNA, 19 nt, Influenza A virus
acaugaccaagaauauggu

SEQ ID NO: 6555 - RNA, 19 nt, Influenza A virus
acaugacccagaaaauggu

SEQ ID NO: 6556 - RNA, 19 nt, Influenza A virus
acauuaccaagaaaauggu

SEQ ID NO: 6557 - RNA, 19 nt, Influenza A virus
acaugaccaaaaagauggu

SEQ ID NO: 6558 - RNA, 19 nt, Influenza A virus
auaugaccaaaaaaauggu

SEQ ID NO: 6559 - RNA, 19 nt, Influenza A virus
auaugacuaagaaaaugau

SEQ ID NO: 6560 - RNA, 19 nt, Influenza A virus
caugaggggauacaagcag

SEQ ID NO: 6561 - RNA, 19 nt, Influenza A virus
cacgagggaauacaagcag

SEQ ID NO: 6562 - RNA, 19 nt, Influenza A virus
cauaagggaauacaagcag

SEQ ID NO: 6563 - RNA, 19 nt, Influenza A virus
caugaaggaauacaagcag

SEQ ID NO: 6564 - RNA, 19 nt, Influenza A virus
caugagggaauacaaucag

SEQ ID NO: 6565 - RNA, 19 nt, Influenza A virus
caugauggaauacaagcag

SEQ ID NO: 6566 - RNA, 19 nt, Influenza A virus
caugagggaauucaagccg

SEQ ID NO: 6567 - RNA, 19 nt, Influenza A virus
caugaagggauucaagcag

SEQ ID NO: 6568 - RNA, 19 nt, Influenza A virus
gaugaugggcauguucaau

SEQ ID NO: 6569 - RNA, 19 nt, Influenza A virus
gaugaugggcauguuuaac

SEQ ID NO: 6570 - RNA, 19 nt, Influenza A virus
gaugauggguauguucaac

SEQ ID NO: 6571 - RNA, 19 nt, Influenza A virus
gaugaugggcauguuuaau

SEQ ID NO: 6572 - RNA, 19 nt, Influenza A virus
gaugauggguauguucaau

SEQ ID NO: 6573 - RNA, 19 nt, Influenza A virus
gaugauggguauguuuaau

SEQ ID NO: 6574 - RNA, 19 nt, Influenza A virus
gaugaugggaauguucaac

SEQ ID NO: 6575 - RNA, 19 nt, Influenza A virus
aacaugaccaagaagaugg

SEQ ID NO: 6576 - RNA, 19 nt, Influenza A virus
aacaugaccaagagaaugg

SEQ ID NO: 6577 - RNA, 19 nt, Influenza A virus
aacaugacuaagaaaaugg

SEQ ID NO: 6578 - RNA, 19 nt, Influenza A virus
aauaugaccaagaaaaugg

SEQ ID NO: 6579 - RNA, 19 nt, Influenza A virus
aauaugacuaagaaaaugg

SEQ ID NO: 6580 - RNA, 19 nt, Influenza A virus
aaugugacuaagaaaaugg

SEQ ID NO: 6581 - RNA, 19 nt, Influenza A virus
aacauaaccaagaaaaugg

SEQ ID NO: 6582 - RNA, 19 nt, Influenza A virus
aacaugaccaaaaaaaugg

SEQ ID NO: 6583 - RNA, 19 nt, Influenza A virus
aacaugaccaagaaaauga

SEQ ID NO: 6584 - RNA, 19 nt, Influenza A virus
aacaugaccaagaauaugg

SEQ ID NO: 6585 - RNA, 19 nt, Influenza A virus
aacaugacccagaaaaugg

SEQ ID NO: 6586 - RNA, 19 nt, Influenza A virus
aacauuaccaagaaaaugg

SEQ ID NO: 6587 - RNA, 19 nt, Influenza A virus
aacaugaccaaaaagaugg

SEQ ID NO: 6588 - RNA, 19 nt, Influenza A virus
aauaugaccaaaaaaaugg

SEQ ID NO: 6589 - RNA, 19 nt, Influenza A virus
aauaugacuaagaaaauga

SEQ ID NO: 6590 - RNA, 19 nt, Influenza A virus
augaugggcauguucaaua

SEQ ID NO: 6591 - RNA, 19 nt, Influenza A virus
augaugggcauguuuaaca

SEQ ID NO: 6592 - RNA, 19 nt, Influenza A virus
augauggguauguucaaca

SEQ ID NO: 6593 - RNA, 19 nt, Influenza A virus
augaugggcauguuuaaua

SEQ ID NO: 6594 - RNA, 19 nt, Influenza A virus
augauggguauguucaaua

SEQ ID NO: 6595 - RNA, 19 nt, Influenza A virus
augauggguauguuuaaua

SEQ ID NO: 6596 - RNA, 19 nt, Influenza A virus
augaugggaauguucaaca

SEQ ID NO: 6597 - RNA, 19 nt, Influenza A virus
caugaccaagaaaaugguu

SEQ ID NO: 6598 - RNA, 19 nt, Influenza A virus
caugaccaagaagaugguc

SEQ ID NO: 6599 - RNA, 19 nt, Influenza A virus
caugaccaagagaaugguc

SEQ ID NO: 6600 - RNA, 19 nt, Influenza A virus
uaugaccaagaaaaugguc

SEQ ID NO: 6601 - RNA, 19 nt, Influenza A virus
cauaaccaagaaaaugguc

SEQ ID NO: 6602 - RNA, 19 nt, Influenza A virus
caugaccaaaaaaaugguc

SEQ ID NO: 6603 - RNA, 19 nt, Influenza A virus
caugaccaagaaaaugauc

SEQ ID NO: 6604 - RNA, 19 nt, Influenza A virus
caugaccaagaauaugguc

SEQ ID NO: 6605 - RNA, 19 nt, Influenza A virus
caugacccagaaaaugguc

SEQ ID NO: 6606 - RNA, 19 nt, Influenza A virus
cauuaccaagaaaaugguc

SEQ ID NO: 6607 - RNA, 19 nt, Influenza A virus
caugaccaaaaagaugguc

SEQ ID NO: 6608 - RNA, 19 nt, Influenza A virus
caugacuaagaaaauggug

SEQ ID NO: 6609 - RNA, 19 nt, Influenza A virus
uaugaccaaaaaaaugguc

SEQ ID NO: 6610 - RNA, 19 nt, Influenza A virus
uaugacuaagaaaauggug

SEQ ID NO: 6611 - RNA, 19 nt, Influenza A virus
caugaccaaaaaaauggua

SEQ ID NO: 6612 - RNA, 19 nt, Influenza A virus
cucauagugaaugcaccag

SEQ ID NO: 6613 - RNA, 19 nt, Influenza A virus
cucauagugaaugcaucaa

SEQ ID NO: 6614 - RNA, 19 nt, Influenza A virus
cuuauagugaaugcaccaa

SEQ ID NO: 6615 - RNA, 19 nt, Influenza A virus
cuaauagugaaugcaccaa

SEQ ID NO: 6616 - RNA, 19 nt, Influenza A virus
cucauaaugaaugcaccaa

SEQ ID NO: 6617 - RNA, 19 nt, Influenza A virus
cucauagugaaugcacaaa

SEQ ID NO: 6618 - RNA, 19 nt, Influenza A virus
cucauagugaaugcaccua

SEQ ID NO: 6619 - RNA, 19 nt, Influenza A virus
cucauaguuaaugcaccaa

SEQ ID NO: 6620 - RNA, 19 nt, Influenza A virus
cucauugugaaugcaccaa

SEQ ID NO: 6621 - RNA, 19 nt, Influenza A virus
cucaucguaaaugcaccga

SEQ ID NO: 6622 - RNA, 19 nt, Influenza A virus
cugauagugaaugcgccca

SEQ ID NO: 6623 - RNA, 19 nt, Influenza A virus
gaccaagaaaauggucacg

SEQ ID NO: 6624 - RNA, 19 nt, Influenza A virus
gaccaagaaaaugguuaca

SEQ ID NO: 6625 - RNA, 19 nt, Influenza A virus
gaccaagaagauggucaca

SEQ ID NO: 6626 - RNA, 19 nt, Influenza A virus
gaccaagagaauggucaca

SEQ ID NO: 6627 - RNA, 19 nt, Influenza A virus
aaccaagaaaauggucaca

SEQ ID NO: 6628 - RNA, 19 nt, Influenza A virus
gaccaaaaaaauggucaca

SEQ ID NO: 6629 - RNA, 19 nt, Influenza A virus
gaccaagaaaaugaucaca

SEQ ID NO: 6630 - RNA, 19 nt, Influenza A virus
gaccaagaaaauggucacc

SEQ ID NO: 6631 - RNA, 19 nt, Influenza A virus
gaccaagaauauggucaca

SEQ ID NO: 6632 - RNA, 19 nt, Influenza A virus
gacccagaaaauggucaca

SEQ ID NO: 6633 - RNA, 19 nt, Influenza A virus
uaccaagaaaauggucaca

SEQ ID NO: 6634 - RNA, 19 nt, Influenza A virus
gaccaaaaagauggucaca

SEQ ID NO: 6635 - RNA, 19 nt, Influenza A virus
gaccaagagaauggucacu

SEQ ID NO: 6636 - RNA, 19 nt, Influenza A virus
gacuaagaaaauggugaca

SEQ ID NO: 6637 - RNA, 19 nt, Influenza A virus
gacuaagaaaauggugacg

SEQ ID NO: 6638 - RNA, 19 nt, Influenza A virus
gaccaaaaaaaugguaaca

SEQ ID NO: 6639 - RNA, 19 nt, Influenza A virus
gacuaagaaaaugauaaca

SEQ ID NO: 6640 - RNA, 19 nt, Influenza A virus
ucauagugaaugcaccaga

SEQ ID NO: 6641 - RNA, 19 nt, Influenza A virus
ucauagugaaugcaucaaa

SEQ ID NO: 6642 - RNA, 19 nt, Influenza A virus
uuauagugaaugcaccaaa

SEQ ID NO: 6643 - RNA, 19 nt, Influenza A virus
uaauagugaaugcaccaaa

SEQ ID NO: 6644 - RNA, 19 nt, Influenza A virus
ucauaaugaaugcaccaaa

SEQ ID NO: 6645 - RNA, 19 nt, Influenza A virus
ucauagugaaugcacaaaa

SEQ ID NO: 6646 - RNA, 19 nt, Influenza A virus
ucauagugaaugcaccuaa

SEQ ID NO: 6647 - RNA, 19 nt, Influenza A virus
ucauaguuaaugcaccaaa

SEQ ID NO: 6648 - RNA, 19 nt, Influenza A virus
ucauugugaaugcaccaaa

SEQ ID NO: 6649 - RNA, 19 nt, Influenza A virus
ucauagugaaugcaccuag

SEQ ID NO: 6650 - RNA, 19 nt, Influenza A virus
ucaucguaaaugcaccgaa

SEQ ID NO: 6651 - RNA, 19 nt, Influenza A virus
ugauagugaaugcgcccaa

SEQ ID NO: 6652 - RNA, 19 nt, Influenza A virus
augggcauguucaacaugu

SEQ ID NO: 6653 - RNA, 19 nt, Influenza A virus
augggcauguuuaacaugc

SEQ ID NO: 6654 - RNA, 19 nt, Influenza A virus
auggguauguucaacaugc

SEQ ID NO: 6655 - RNA, 19 nt, Influenza A virus
augggcauguucaauaugu

SEQ ID NO: 6656 - RNA, 19 nt, Influenza A virus
augggcauguuuaauaugc

SEQ ID NO: 6657 - RNA, 19 nt, Influenza A virus
auggguauguucaauaugu

SEQ ID NO: 6658 - RNA, 19 nt, Influenza A virus
augggaauguucaacaugc

SEQ ID NO: 6659 - RNA, 19 nt, Influenza A virus
acaacaugaccaagaagau

SEQ ID NO: 6660 - RNA, 19 nt, Influenza A virus
acaacaugaccaagagaau

SEQ ID NO: 6661 - RNA, 19 nt, Influenza A virus
acaacaugacuaagaaaau

SEQ ID NO: 6662 - RNA, 19 nt, Influenza A virus
acaauaugaccaagaaaau

SEQ ID NO: 6663 - RNA, 19 nt, Influenza A virus
auaacaugaccaagaaaau

SEQ ID NO: 6664 - RNA, 19 nt, Influenza A virus
acaauaugacuaagaaaau

SEQ ID NO: 6665 - RNA, 19 nt, Influenza A virus
acaaugugacuaagaaaau

SEQ ID NO: 6666 - RNA, 19 nt, Influenza A virus
acaacauaaccaagaaaau

SEQ ID NO: 6667 - RNA, 19 nt, Influenza A virus
acaacaugaccaaaaaaau

SEQ ID NO: 6668 - RNA, 19 nt, Influenza A virus
acaacaugaccaagaauau

SEQ ID NO: 6669 - RNA, 19 nt, Influenza A virus
acaacaugacccagaaaau

SEQ ID NO: 6670 - RNA, 19 nt, Influenza A virus
acaacauuaccaagaaaau

SEQ ID NO: 6671 - RNA, 19 nt, Influenza A virus
acaacaugaccaaaaagau

SEQ ID NO: 6672 - RNA, 19 nt, Influenza A virus
acaauaugaccaaaaaaau

SEQ ID NO: 6673 - RNA, 19 nt, Influenza A virus
auagugaaugcaccagauc

SEQ ID NO: 6674 - RNA, 19 nt, Influenza A virus
auagugaaugcaucaaauc

SEQ ID NO: 6675 - RNA, 19 nt, Influenza A virus
auaaugaaugcaccaaauc

SEQ ID NO: 6676 - RNA, 19 nt, Influenza A virus
auagugaaugcacaaaauc

SEQ ID NO: 6677 - RNA, 19 nt, Influenza A virus
auagugaaugcaccaaacc

SEQ ID NO: 6678 - RNA, 19 nt, Influenza A virus
auagugaaugcaccuaauc

SEQ ID NO: 6679 - RNA, 19 nt, Influenza A virus
auaguuaaugcaccaaauc

SEQ ID NO: 6680 - RNA, 19 nt, Influenza A virus
auugugaaugcaccaaauc

SEQ ID NO: 6681 - RNA, 19 nt, Influenza A virus
auagugaaugcaccuaguc

SEQ ID NO: 6682 - RNA, 19 nt, Influenza A virus
auugugaaugcacccaauc

SEQ ID NO: 6683 - RNA, 19 nt, Influenza A virus
aucguaaaugcaccgaauc

SEQ ID NO: 6684 - RNA, 19 nt, Influenza A virus
uagugaaugcaccagauca

SEQ ID NO: 6685 - RNA, 19 nt, Influenza A virus
uagugaaugcaucaaauca

SEQ ID NO: 6686 - RNA, 19 nt, Influenza A virus
uaaugaaugcaccaaauca

SEQ ID NO: 6687 - RNA, 19 nt, Influenza A virus
uagugaaugcacaaaauca

SEQ ID NO: 6688 - RNA, 19 nt, Influenza A virus
uagugaaugcaccaaacca

SEQ ID NO: 6689 - RNA, 19 nt, Influenza A virus
uagugaaugcaccuaauca

SEQ ID NO: 6690 - RNA, 19 nt, Influenza A virus
uaguuaaugcaccaaauca

SEQ ID NO: 6691 - RNA, 19 nt, Influenza A virus
uugugaaugcaccaaauca

SEQ ID NO: 6692 - RNA, 19 nt, Influenza A virus
uagugaaugcaccuaguca

SEQ ID NO: 6693 - RNA, 19 nt, Influenza A virus
uugugaaugcacccaauca

SEQ ID NO: 6694 - RNA, 19 nt, Influenza A virus
ucguaaaugcaccgaauca

SEQ ID NO: 6695 - RNA, 19 nt, Influenza A virus
gccauggugucuagggcuc

SEQ ID NO: 6696 - RNA, 19 nt, Influenza A virus
gccauggugucuggggccc

SEQ ID NO: 6697 - RNA, 19 nt, Influenza A virus
gcaauggugucuagggccc

SEQ ID NO: 6698 - RNA, 19 nt, Influenza A virus
gccaugaugucuagggccc

SEQ ID NO: 6699 - RNA, 19 nt, Influenza A virus
gccaugguaucuagggccc

SEQ ID NO: 6700 - RNA, 19 nt, Influenza A virus
gccauggugucuaaggccc

SEQ ID NO: 6701 - RNA, 19 nt, Influenza A virus
gccauggugucuagagccc

SEQ ID NO: 6702 - RNA, 19 nt, Influenza A virus
gccauggugucucgggccc

SEQ ID NO: 6703 - RNA, 19 nt, Influenza A virus
gccaugguuucuagggccc

SEQ ID NO: 6704 - RNA, 19 nt, Influenza A virus
gccauggugucucgggcuc

SEQ ID NO: 6705 - RNA, 19 nt, Influenza A virus
gccaugguaucuaggaccc

SEQ ID NO: 6706 - RNA, 19 nt, Influenza A virus
gccaugguaucuagggcca

SEQ ID NO: 6707 - RNA, 19 nt, Influenza A virus
gccaugguuuccagggccc

SEQ ID NO: 6708 - RNA, 19 nt, Influenza A virus
gacaacaugaccaagaaga

SEQ ID NO: 6709 - RNA, 19 nt, Influenza A virus
gacaacaugaccaagagaa

SEQ ID NO: 6710 - RNA, 19 nt, Influenza A virus
gacaacaugacuaagaaaa

SEQ ID NO: 6711 - RNA, 19 nt, Influenza A virus
gacaauaugaccaagaaaa

SEQ ID NO: 6712 - RNA, 19 nt, Influenza A virus
gauaacaugaccaagaaaa

SEQ ID NO: 6713 - RNA, 19 nt, Influenza A virus
gacaauaugacuaagaaaa

SEQ ID NO: 6714 - RNA, 19 nt, Influenza A virus
gacaaugugacuaagaaaa

SEQ ID NO: 6715 - RNA, 19 nt, Influenza A virus
gacaacauaaccaagaaaa

SEQ ID NO: 6716 - RNA, 19 nt, Influenza A virus
gacaacaugaccaaaaaaa

SEQ ID NO: 6717 - RNA, 19 nt, Influenza A virus
gacaacaugaccaagaaua

SEQ ID NO: 6718 - RNA, 19 nt, Influenza A virus
gacaacaugacccagaaaa

SEQ ID NO: 6719 - RNA, 19 nt, Influenza A virus
gacaacauuaccaagaaaa

SEQ ID NO: 6720 - RNA, 19 nt, Influenza A virus
gacaacaugaccaaaaaga

SEQ ID NO: 6721 - RNA, 19 nt, Influenza A virus
gacaauaugaccaaaaaaa

SEQ ID NO: 6722 - RNA, 19 nt, Influenza A virus
ugggcauguucaacauguu

SEQ ID NO: 6723 - RNA, 19 nt, Influenza A virus
ugggcauguuuaacaugcu

SEQ ID NO: 6724 - RNA, 19 nt, Influenza A virus
uggguauguucaacaugcu

SEQ ID NO: 6725 - RNA, 19 nt, Influenza A virus
ugggcauguucaauauguu

SEQ ID NO: 6726 - RNA, 19 nt, Influenza A virus
ugggcauguuuaauaugcu

SEQ ID NO: 6727 - RNA, 19 nt, Influenza A virus
uggguauguucaauauguu

SEQ ID NO: 6728 - RNA, 19 nt, Influenza A virus
ugggaauguucaacaugcu

SEQ ID NO: 6729 - RNA, 19 nt, Influenza A virus
ccauggugucuagggcucg

SEQ ID NO: 6730 - RNA, 19 nt, Influenza A virus
ccauggugucuggggcccg

SEQ ID NO: 6731 - RNA, 19 nt, Influenza A virus
caauggugucuagggcccg

SEQ ID NO: 6732 - RNA, 19 nt, Influenza A virus
ccaugaugucuagggcccg

SEQ ID NO: 6733 - RNA, 19 nt, Influenza A virus
ccaugguaucuagggcccg

SEQ ID NO: 6734 - RNA, 19 nt, Influenza A virus
ccauggugucuaaggcccg

SEQ ID NO: 6735 - RNA, 19 nt, Influenza A virus
ccauggugucuagagcccg

SEQ ID NO: 6736 - RNA, 19 nt, Influenza A virus
ccauggugucucgggcccg

SEQ ID NO: 6737 - RNA, 19 nt, Influenza A virus
ccaugguuucuagggcccg

SEQ ID NO: 6738 - RNA, 19 nt, Influenza A virus
ccauggugucucgggcucg

SEQ ID NO: 6739 - RNA, 19 nt, Influenza A virus
ccaugguaucuaggacccg

SEQ ID NO: 6740 - RNA, 19 nt, Influenza A virus
ccaugguaucuagggccag

SEQ ID NO: 6741 - RNA, 19 nt, Influenza A virus
ccaugguuuccagggcccg

SEQ ID NO: 6742 - RNA, 19 nt, Influenza A virus
caacaugaccaagaagaug

SEQ ID NO: 6743 - RNA, 19 nt, Influenza A virus
caacaugaccaagagaaug

SEQ ID NO: 6744 - RNA, 19 nt, Influenza A virus
caacaugacuaagaaaaug

SEQ ID NO: 6745 - RNA, 19 nt, Influenza A virus
caauaugaccaagaaaaug

SEQ ID NO: 6746 - RNA, 19 nt, Influenza A virus
uaacaugaccaagaaaaug

SEQ ID NO: 6747 - RNA, 19 nt, Influenza A virus
caauaugacuaagaaaaug

SEQ ID NO: 6748 - RNA, 19 nt, Influenza A virus
caaugugacuaagaaaaug

SEQ ID NO: 6749 - RNA, 19 nt, Influenza A virus
caacauaaccaagaaaaug

SEQ ID NO: 6750 - RNA, 19 nt, Influenza A virus
caacaugaccaaaaaaaug

SEQ ID NO: 6751 - RNA, 19 nt, Influenza A virus
caacaugaccaagaauaug

SEQ ID NO: 6752 - RNA, 19 nt, Influenza A virus
caacaugacccagaaaaug

SEQ ID NO: 6753 - RNA, 19 nt, Influenza A virus
caacauuaccaagaaaaug

SEQ ID NO: 6754 - RNA, 19 nt, Influenza A virus
caacaugaccaaaaagaug

SEQ ID NO: 6755 - RNA, 19 nt, Influenza A virus
caauaugaccaaaaaaaug

SEQ ID NO: 6756 - RNA, 19 nt, Influenza A virus
caacaugagcaagaaaaag

SEQ ID NO: 6757 - RNA, 19 nt, Influenza A virus
ugaaugcaccagaucauga

SEQ ID NO: 6758 - RNA, 19 nt, Influenza A virus
ugaaugcaucaaaucauga

SEQ ID NO: 6759 - RNA, 19 nt, Influenza A virus
ugaaugcacaaaaucauga

SEQ ID NO: 6760 - RNA, 19 nt, Influenza A virus
ugaaugcaccaaaccauga

SEQ ID NO: 6761 - RNA, 19 nt, Influenza A virus
ugaaugcaccaaaucacga

SEQ ID NO: 6762 - RNA, 19 nt, Influenza A virus
ugaaugcaccaaaucauaa

SEQ ID NO: 6763 - RNA, 19 nt, Influenza A virus
ugaaugcacccaaucauga

SEQ ID NO: 6764 - RNA, 19 nt, Influenza A virus
ugaaugcaccuaaucauga

SEQ ID NO: 6765 - RNA, 19 nt, Influenza A virus
uuaaugcaccaaaucauga

SEQ ID NO: 6766 - RNA, 19 nt, Influenza A virus
uaaaugcaccgaaucauga

SEQ ID NO: 6767 - RNA, 19 nt, Influenza A virus
ugaaugcaccuagucauga

SEQ ID NO: 6768 - RNA, 19 nt, Influenza A virus
uaaaugcgccgaaucauga

SEQ ID NO: 6769 - RNA, 19 nt, Influenza A virus
uaaaugcacccaaucauga

SEQ ID NO: 6770 - RNA, 19 nt, Influenza A virus
ugaaugcacccaaucaugc

SEQ ID NO: 6771 - RNA, 19 nt, Influenza A virus
uaaacgcaccgaaucauga

SEQ ID NO: 6772 - RNA, 19 nt, Influenza A virus
gugaaugcaccagaucaug

SEQ ID NO: 6773 - RNA, 19 nt, Influenza A virus
gugaaugcaucaaaucaug

SEQ ID NO: 6774 - RNA, 19 nt, Influenza A virus
augaaugcaccaaaucaug

SEQ ID NO: 6775 - RNA, 19 nt, Influenza A virus
gugaaugcacaaaaucaug

SEQ ID NO: 6776 - RNA, 19 nt, Influenza A virus
gugaaugcaccaaaccaug

SEQ ID NO: 6777 - RNA, 19 nt, Influenza A virus
gugaaugcaccaaaucacg

SEQ ID NO: 6778 - RNA, 19 nt, Influenza A virus
gugaaugcaccaaaucaua

SEQ ID NO: 6779 - RNA, 19 nt, Influenza A virus
gugaaugcacccaaucaug

SEQ ID NO: 6780 - RNA, 19 nt, Influenza A virus
gugaaugcaccuaaucaug

SEQ ID NO: 6781 - RNA, 19 nt, Influenza A virus
guuaaugcaccaaaucaug

SEQ ID NO: 6782 - RNA, 19 nt, Influenza A virus
guaaaugcaccgaaucaug

SEQ ID NO: 6783 - RNA, 19 nt, Influenza A virus
gugaaugcaccuagucaug

SEQ ID NO: 6784 - RNA, 19 nt, Influenza A virus
guaaaugcgccgaaucaug

SEQ ID NO: 6785 - RNA, 19 nt, Influenza A virus
guaaaugcacccaaucaug

SEQ ID NO: 6786 - RNA, 19 nt, Influenza A virus
gugaaugcacccaaccaug

SEQ ID NO: 6787 - RNA, 19 nt, Influenza A virus
guaaacgcaccgaaucaug

SEQ ID NO: 6788 - RNA, 19 nt, Influenza A virus
gugaaugcacccaacuaug

SEQ ID NO: 6789 - RNA, 19 nt, Influenza A virus
agaucaugaagaucuguuu

SEQ ID NO: 6790 - RNA, 19 nt, Influenza A virus
agaucaugaggaucuguuc

SEQ ID NO: 6791 - RNA, 19 nt, Influenza A virus
aaaucaugaagaucuguuc

SEQ ID NO: 6792 - RNA, 19 nt, Influenza A virus
agaccaugaagaucuguuc

SEQ ID NO: 6793 - RNA, 19 nt, Influenza A virus
agaucacgaagaucuguuc

SEQ ID NO: 6794 - RNA, 19 nt, Influenza A virus
agaucaugaaaaucuguuc

SEQ ID NO: 6795 - RNA, 19 nt, Influenza A virus
agaucaugaagaccuguuc

SEQ ID NO: 6796 - RNA, 19 nt, Influenza A virus
agaucaugaagaucugcuc

SEQ ID NO: 6797 - RNA, 19 nt, Influenza A virus
agaucaugaagaucuguua

SEQ ID NO: 6798 - RNA, 19 nt, Influenza A virus
agauccugaagaucuguuc

SEQ ID NO: 6799 - RNA, 19 nt, Influenza A virus
agaucuugaagaucuguuc

SEQ ID NO: 6800 - RNA, 19 nt, Influenza A virus
agaucauaaagaccuguuc

SEQ ID NO: 6801 - RNA, 19 nt, Influenza A virus
agaucaugaagaccugcuc

SEQ ID NO: 6802 - RNA, 19 nt, Influenza A virus
ucaugaggggauacaagca

SEQ ID NO: 6803 - RNA, 19 nt, Influenza A virus
ccaugagggaauacaagca

SEQ ID NO: 6804 - RNA, 19 nt, Influenza A virus
ucacgagggaauacaagca

SEQ ID NO: 6805 - RNA, 19 nt, Influenza A virus
ucauaagggaauacaagca

SEQ ID NO: 6806 - RNA, 19 nt, Influenza A virus
ucaugaaggaauacaagca

SEQ ID NO: 6807 - RNA, 19 nt, Influenza A virus
ucaugagggaauacaauca

SEQ ID NO: 6808 - RNA, 19 nt, Influenza A virus
ucaugauggaauacaagca

SEQ ID NO: 6809 - RNA, 19 nt, Influenza A virus
ucaugagggaauucaagcc

SEQ ID NO: 6810 - RNA, 19 nt, Influenza A virus
ucaugaagggauucaagca

SEQ ID NO: 6811 - RNA, 19 nt, Influenza A virus
cagcgcaaaaugcuauaag

SEQ ID NO: 6812 - RNA, 19 nt, Influenza A virus
cagcgcagaaugccauaag

SEQ ID NO: 6813 - RNA, 19 nt, Influenza A virus
cagugcaaaaugccauaag

SEQ ID NO: 6814 - RNA, 19 nt, Influenza A virus
cggcgcaaaaugccauaag

SEQ ID NO: 6815 - RNA, 19 nt, Influenza A virus
cagugcaaaaugcuauaag

SEQ ID NO: 6816 - RNA, 19 nt, Influenza A virus
caacgcaaaaugccauaag

SEQ ID NO: 6817 - RNA, 19 nt, Influenza A virus
cagcacaaaaugccauaag

SEQ ID NO: 6818 - RNA, 19 nt, Influenza A virus
cagcgcaaaaugcaauaag

SEQ ID NO: 6819 - RNA, 19 nt, Influenza A virus
cagcucaaaaugccauaag

SEQ ID NO: 6820 - RNA, 19 nt, Influenza A virus
caucgcaaaaugccauaag

SEQ ID NO: 6821 - RNA, 19 nt, Influenza A virus
cagcacaaaaugcuauaag

SEQ ID NO: 6822 - RNA, 19 nt, Influenza A virus
cagcacaaaauguuauaag

SEQ ID NO: 6823 - RNA, 19 nt, Influenza A virus
cagcacaaagugcuauaag

SEQ ID NO: 6824 - RNA, 19 nt, Influenza A virus
cagcacaaaaugcaauaag

SEQ ID NO: 6825 - RNA, 19 nt, Influenza A virus
gaauucuugaggaugagca

SEQ ID NO: 6826 - RNA, 19 nt, Influenza A virus
gaauucuugaggauggaca

SEQ ID NO: 6827 - RNA, 19 nt, Influenza A virus
gaauacuugaggaugaaca

SEQ ID NO: 6828 - RNA, 19 nt, Influenza A virus
gaauccuugaggaugaaca

SEQ ID NO: 6829 - RNA, 19 nt, Influenza A virus
gaauuauugaggaugaaca

SEQ ID NO: 6830 - RNA, 19 nt, Influenza A virus
gaauucucgaggaugaaca

SEQ ID NO: 6831 - RNA, 19 nt, Influenza A virus
gaauucuugaagaugaaca

SEQ ID NO: 6832 - RNA, 19 nt, Influenza A virus
gaauucuugaggacgaaca

SEQ ID NO: 6833 - RNA, 19 nt, Influenza A virus
gaauucuugaggaucaaca

SEQ ID NO: 6834 - RNA, 19 nt, Influenza A virus
gaauacuugaggaugagca

SEQ ID NO: 6835 - RNA, 19 nt, Influenza A virus
ggauacuugaggaugagca

SEQ ID NO: 6836 - RNA, 19 nt, Influenza A virus
gaauacuugaagaugaaca

SEQ ID NO: 6837 - RNA, 19 nt, Influenza A virus
gaguacuugaagaugaaca

SEQ ID NO: 6838 - RNA, 19 nt, Influenza A virus
gaucaugaagaucuguuuc

SEQ ID NO: 6839 - RNA, 19 nt, Influenza A virus
gaucaugaggaucuguucc

SEQ ID NO: 6840 - RNA, 19 nt, Influenza A virus
aaucaugaagaucuguucc

SEQ ID NO: 6841 - RNA, 19 nt, Influenza A virus
gaccaugaagaucuguucc

SEQ ID NO: 6842 - RNA, 19 nt, Influenza A virus
gaucacgaagaucuguucc

SEQ ID NO: 6843 - RNA, 19 nt, Influenza A virus
gaucaugaaaaucuguucc

SEQ ID NO: 6844 - RNA, 19 nt, Influenza A virus
gaucaugaagaccuguucc

SEQ ID NO: 6845 - RNA, 19 nt, Influenza A virus
gaucaugaagaucugcucc

SEQ ID NO: 6846 - RNA, 19 nt, Influenza A virus
gaucaugaagaucuguuac

SEQ ID NO: 6847 - RNA, 19 nt, Influenza A virus
gauccugaagaucuguucc

SEQ ID NO: 6848 - RNA, 19 nt, Influenza A virus
gaucuugaagaucuguucc

SEQ ID NO: 6849 - RNA, 19 nt, Influenza A virus
gaucaugaagaccuguucu

SEQ ID NO: 6850 - RNA, 19 nt, Influenza A virus
gaucauaaagaccuguucc

SEQ ID NO: 6851 - RNA, 19 nt, Influenza A virus
gaucaugaagaccugcucc

SEQ ID NO: 6852 - RNA, 19 nt, Influenza A virus
agugaaugcaccagaucau

SEQ ID NO: 6853 - RNA, 19 nt, Influenza A virus
agugaaugcaucaaaucau

SEQ ID NO: 6854 - RNA, 19 nt, Influenza A virus
aaugaaugcaccaaaucau

SEQ ID NO: 6855 - RNA, 19 nt, Influenza A virus
agugaaugcacaaaaucau

SEQ ID NO: 6856 - RNA, 19 nt, Influenza A virus
agugaaugcaccaaaccau

SEQ ID NO: 6857 - RNA, 19 nt, Influenza A virus
agugaaugcaccaaaucac

SEQ ID NO: 6858 - RNA, 19 nt, Influenza A virus
agugaaugcaccuaaucau

SEQ ID NO: 6859 - RNA, 19 nt, Influenza A virus
aguuaaugcaccaaaucau

SEQ ID NO: 6860 - RNA, 19 nt, Influenza A virus
ugugaaugcaccaaaucau

SEQ ID NO: 6861 - RNA, 19 nt, Influenza A virus
agugaaugcaccuagucau

SEQ ID NO: 6862 - RNA, 19 nt, Influenza A virus
ugugaaugcacccaaucau

SEQ ID NO: 6863 - RNA, 19 nt, Influenza A virus
cguaaaugcaccgaaucau

SEQ ID NO: 6864 - RNA, 19 nt, Influenza A virus
ggaauucuugaggaugagc

SEQ ID NO: 6865 - RNA, 19 nt, Influenza A virus
ggaauucuugaggauggac

SEQ ID NO: 6866 - RNA, 19 nt, Influenza A virus
ggaauacuugaggaugaac

SEQ ID NO: 6867 - RNA, 19 nt, Influenza A virus
ggaauccuugaggaugaac

SEQ ID NO: 6868 - RNA, 19 nt, Influenza A virus
ggaauuauugaggaugaac

SEQ ID NO: 6869 - RNA, 19 nt, Influenza A virus
ggaauucucgaggaugaac

SEQ ID NO: 6870 - RNA, 19 nt, Influenza A virus
ggaauucuugaagaugaac

SEQ ID NO: 6871 - RNA, 19 nt, Influenza A virus
ggaauucuugaggacgaac

SEQ ID NO: 6872 - RNA, 19 nt, Influenza A virus
ggaauucuugaggaucaac

SEQ ID NO: 6873 - RNA, 19 nt, Influenza A virus
ggaauacuugaggaugagc

SEQ ID NO: 6874 - RNA, 19 nt, Influenza A virus
gggauacuugaggaugagc

SEQ ID NO: 6875 - RNA, 19 nt, Influenza A virus
ggaauacuugaagaugaac

SEQ ID NO: 6876 - RNA, 19 nt, Influenza A virus
ggaguacuugaagaugaac

SEQ ID NO: 6877 - RNA, 19 nt, Influenza A virus
uuaaagccuauguggaugg

SEQ ID NO: 6878 - RNA, 19 nt, Influenza A virus
uuagaaccuauguggaugg

SEQ ID NO: 6879 - RNA, 19 nt, Influenza A virus
uuagagccuauguagaugg

SEQ ID NO: 6880 - RNA, 19 nt, Influenza A virus
uuagagccuauguggauag

SEQ ID NO: 6881 - RNA, 19 nt, Influenza A virus
uuuaaagccuauguggaug

SEQ ID NO: 6882 - RNA, 19 nt, Influenza A virus
uuuagaaccuauguggaug

SEQ ID NO: 6883 - RNA, 19 nt, Influenza A virus
uuuagagccuauguagaug

SEQ ID NO: 6884 - RNA, 19 nt, Influenza A virus
uuuagagccuauguggaua

SEQ ID NO: 6885 - RNA, 19 nt, Influenza A virus
agcaguugaggagugccug

SEQ ID NO: 6886 - RNA, 19 nt, Influenza A virus
agcaauugaggaaugccug

SEQ ID NO: 6887 - RNA, 19 nt, Influenza A virus
agcaauugaggagugccua

SEQ ID NO: 6888 - RNA, 19 nt, Influenza A virus
uugaggagugccugguuaa

SEQ ID NO: 6889 - RNA, 19 nt, Influenza A virus
uugaggaaugccugauuaa

SEQ ID NO: 6890 - RNA, 19 nt, Influenza A virus
uugaggagugccuaauuaa

SEQ ID NO: 6891 - RNA, 19 nt, Influenza A virus
gcaauugaggagugccugg

SEQ ID NO: 6892 - RNA, 19 nt, Influenza A virus
gcaguugaggagugccuga

SEQ ID NO: 6893 - RNA, 19 nt, Influenza A virus
gcaauugaggaaugccuga

SEQ ID NO: 6894 - RNA, 19 nt, Influenza A virus
gcaauugaggagugccuaa

SEQ ID NO: 6895 - RNA, 19 nt, Influenza A virus
auugaggagugccugguua

SEQ ID NO: 6896 - RNA, 19 nt, Influenza A virus
guugaggagugccugauua

SEQ ID NO: 6897 - RNA, 19 nt, Influenza A virus
auugaggaaugccugauua

SEQ ID NO: 6898 - RNA, 19 nt, Influenza A virus
auugaggagugccuaauua

SEQ ID NO: 6899 - RNA, 19 nt, Influenza A virus
caauugaggagugccuggu

SEQ ID NO: 6900 - RNA, 19 nt, Influenza A virus
caguugaggagugccugau

SEQ ID NO: 6901 - RNA, 19 nt, Influenza A virus
caauugaggaaugccugau

SEQ ID NO: 6902 - RNA, 19 nt, Influenza A virus
caauugaggagugccuaau

SEQ ID NO: 6903 - RNA, 19 nt, Influenza A virus
aauugaggagugccugguu

SEQ ID NO: 6904 - RNA, 19 nt, Influenza A virus
aguugaggagugccugauu

SEQ ID NO: 6905 - RNA, 19 nt, Influenza A virus
aauugaggaaugccugauu

SEQ ID NO: 6906 - RNA, 19 nt, Influenza A virus
aauugaggagugccuaauu

SEQ ID NO: 6907 - RNA, 19 nt, Influenza A virus
uagagccuauguggauggg

SEQ ID NO: 6908 - RNA, 19 nt, Influenza A virus
uaaagccuauguggaugga

SEQ ID NO: 6909 - RNA, 19 nt, Influenza A virus
uagaaccuauguggaugga

SEQ ID NO: 6910 - RNA, 19 nt, Influenza A virus
uagagccuauguagaugga

SEQ ID NO: 6911 - RNA, 19 nt, Influenza A virus
uagagccuauguggauaga

SEQ ID NO: 6912 - RNA, 19 nt, Influenza A virus
agagccuauguggaugggu

SEQ ID NO: 6913 - RNA, 19 nt, Influenza A virus
aaagccuauguggauggau

SEQ ID NO: 6914 - RNA, 19 nt, Influenza A virus
agaaccuauguggauggau

SEQ ID NO: 6915 - RNA, 19 nt, Influenza A virus
agagccuauguagauggau

SEQ ID NO: 6916 - RNA, 19 nt, Influenza A virus
agagccuauguggauagau

SEQ ID NO: 6917 - RNA, 19 nt, Influenza A virus
gagccuauguggauggguu

SEQ ID NO: 6918 - RNA, 19 nt, Influenza A virus
aagccuauguggauggauu

SEQ ID NO: 6919 - RNA, 19 nt, Influenza A virus
gaaccuauguggauggauu

SEQ ID NO: 6920 - RNA, 19 nt, Influenza A virus
gagccuauguagauggauu

SEQ ID NO: 6921 - RNA, 19 nt, Influenza A virus
gagccuauguggauagauu

SEQ ID NO: 6922 - RNA, 19 nt, Influenza A virus
gagccuauguggauggaua

SEQ ID NO: 6923 - RNA, 19 nt, Influenza A virus
uaacgaucccuggguuuug

SEQ ID NO: 6924 - RNA, 19 nt, Influenza A virus
uaaugaucccugggcuuug

SEQ ID NO: 6925 - RNA, 19 nt, Influenza A virus
uaaugaucccuggguucug

SEQ ID NO: 6926 - RNA, 19 nt, Influenza A virus
uuaacgaucccuggguuuu

SEQ ID NO: 6927 - RNA, 19 nt, Influenza A virus
uuaaugaucccugggcuuu

SEQ ID NO: 6928 - RNA, 19 nt, Influenza A virus
uuaaugaucccuggguucu

SEQ ID NO: 6929 - RNA, 19 nt, Influenza A virus
acgaucccuggguuuugcu

SEQ ID NO: 6930 - RNA, 19 nt, Influenza A virus
augaucccugggcuuugcu

SEQ ID NO: 6931 - RNA, 19 nt, Influenza A virus
augaucccuggguucugcu

SEQ ID NO: 6932 - RNA, 19 nt, Influenza A virus
aacgaucccuggguuuugc

SEQ ID NO: 6933 - RNA, 19 nt, Influenza A virus
aaugaucccugggcuuugc

SEQ ID NO: 6934 - RNA, 19 nt, Influenza A virus
aaugaucccuggguucugc

SEQ ID NO: 6935 - RNA, 19 nt, Influenza A virus
ccugguuaaugaucccugg

SEQ ID NO: 6936 - RNA, 19 nt, Influenza A virus
ccuaauuaaugaucccugg

SEQ ID NO: 6937 - RNA, 19 nt, Influenza A virus
ccugauuaacgaucccugg

SEQ ID NO: 6938 - RNA, 19 nt, Influenza A virus
ugccugguuaaugaucccu

SEQ ID NO: 6939 - RNA, 19 nt, Influenza A virus
ugccuaauuaaugaucccu

SEQ ID NO: 6940 - RNA, 19 nt, Influenza A virus
ugccugauuaacgaucccu

SEQ ID NO: 6941 - RNA, 19 nt, Influenza A virus
guuaaugaucccuggguuu

SEQ ID NO: 6942 - RNA, 19 nt, Influenza A virus
auuaacgaucccuggguuu

SEQ ID NO: 6943 - RNA, 19 nt, Influenza A virus
auuaaugaucccugggcuu

SEQ ID NO: 6944 - RNA, 19 nt, Influenza A virus
auuaaugaucccuggguuc

SEQ ID NO: 6945 - RNA, 19 nt, Influenza A virus
gccugguuaaugaucccug

SEQ ID NO: 6946 - RNA, 19 nt, Influenza A virus
gccuaauuaaugaucccug

SEQ ID NO: 6947 - RNA, 19 nt, Influenza A virus
gccugauuaacgaucccug

SEQ ID NO: 6948 - RNA, 19 nt, Influenza A virus
cugguuaaugaucccuggg

SEQ ID NO: 6949 - RNA, 19 nt, Influenza A virus
cuaauuaaugaucccuggg

SEQ ID NO: 6950 - RNA, 19 nt, Influenza A virus
cugauuaacgaucccuggg

SEQ ID NO: 6951 - RNA, 19 nt, Influenza A virus
gguuaaugaucccuggguu

SEQ ID NO: 6952 - RNA, 19 nt, Influenza A virus
aauuaaugaucccuggguu

SEQ ID NO: 6953 - RNA, 19 nt, Influenza A virus
gauuaacgaucccuggguu

SEQ ID NO: 6954 - RNA, 19 nt, Influenza A virus
gauuaaugaucccugggcu

SEQ ID NO: 6955 - RNA, 19 nt, Influenza A virus
ugguuaaugaucccugggu

SEQ ID NO: 6956 - RNA, 19 nt, Influenza A virus
uaauuaaugaucccugggu

SEQ ID NO: 6957 - RNA, 19 nt, Influenza A virus
ugauuaacgaucccugggu

SEQ ID NO: 6958 - RNA, 19 nt, Influenza A virus
ugauuaaugaucccugggc

SEQ ID NO: 6959 - RNA, 19 nt, Influenza A virus
uauaugaagcaguugagga

SEQ ID NO: 6960 - RNA, 19 nt, Influenza A virus
uauauggagcaauugagga

SEQ ID NO: 6961 - RNA, 19 nt, Influenza A virus
cuauaugaagcaguugagg

SEQ ID NO: 6962 - RNA, 19 nt, Influenza A virus
cuauauggagcaauugagg

SEQ ID NO: 6963 - RNA, 19 nt, Influenza A virus
uuauaugaagcaauugagg

SEQ ID NO: 6964 - RNA, 19 nt, Influenza A virus
cuugguucaacuccuucuu

SEQ ID NO: 6965 - RNA, 19 nt, Influenza A virus
cuugguuuaacuccuuccu

SEQ ID NO: 6966 - RNA, 19 nt, Influenza A virus
caugguucaacuccuuccu

SEQ ID NO: 6967 - RNA, 19 nt, Influenza A virus
ccugguucaacuccuuccu

SEQ ID NO: 6968 - RNA, 19 nt, Influenza A virus
cgugguucaacuccuuccu

SEQ ID NO: 6969 - RNA, 19 nt, Influenza A virus
ucuugguucaacuccuucu

SEQ ID NO: 6970 - RNA, 19 nt, Influenza A virus
ucuugguuuaacuccuucc

SEQ ID NO: 6971 - RNA, 19 nt, Influenza A virus
ucaugguucaacuccuucc

SEQ ID NO: 6972 - RNA, 19 nt, Influenza A virus
uccugguucaacuccuucc

SEQ ID NO: 6973 - RNA, 19 nt, Influenza A virus
ucgugguucaacuccuucc

SEQ ID NO: 6974 - RNA, 19 nt, Influenza A virus
aggagugccugguuaauga

SEQ ID NO: 6975 - RNA, 19 nt, Influenza A virus
aggaaugccugauuaauga

SEQ ID NO: 6976 - RNA, 19 nt, Influenza A virus
aggagugccuaauuaauga

SEQ ID NO: 6977 - RNA, 19 nt, Influenza A virus
aggagugccugauuaacga

SEQ ID NO: 6978 - RNA, 19 nt, Influenza A virus
gagugccugguuaaugauc

SEQ ID NO: 6979 - RNA, 19 nt, Influenza A virus
gaaugccugauuaaugauc

SEQ ID NO: 6980 - RNA, 19 nt, Influenza A virus
gagugccuaauuaaugauc

SEQ ID NO: 6981 - RNA, 19 nt, Influenza A virus
gagugccugauuaacgauc

SEQ ID NO: 6982 - RNA, 19 nt, Influenza A virus
ugaggagugccugguuaau

SEQ ID NO: 6983 - RNA, 19 nt, Influenza A virus
ugaggaaugccugauuaau

SEQ ID NO: 6984 - RNA, 19 nt, Influenza A virus
ugaggagugccuaauuaau

SEQ ID NO: 6985 - RNA, 19 nt, Influenza A virus
ugaggagugccugauuaac

SEQ ID NO: 6986 - RNA, 19 nt, Influenza A virus
gugccugguuaaugauccc

SEQ ID NO: 6987 - RNA, 19 nt, Influenza A virus
augccugauuaaugauccc

SEQ ID NO: 6988 - RNA, 19 nt, Influenza A virus
gugccuaauuaaugauccc

SEQ ID NO: 6989 - RNA, 19 nt, Influenza A virus
gugccugauuaacgauccc

SEQ ID NO: 6990 - RNA, 19 nt, Influenza A virus
ggagugccugguuaaugau

SEQ ID NO: 6991 - RNA, 19 nt, Influenza A virus
ggaaugccugauuaaugau

SEQ ID NO: 6992 - RNA, 19 nt, Influenza A virus
ggagugccuaauuaaugau

SEQ ID NO: 6993 - RNA, 19 nt, Influenza A virus
ggagugccugauuaacgau

SEQ ID NO: 6994 - RNA, 19 nt, Influenza A virus
gaggagugccugguuaaug

SEQ ID NO: 6995 - RNA, 19 nt, Influenza A virus
gaggaaugccugauuaaug

SEQ ID NO: 6996 - RNA, 19 nt, Influenza A virus
gaggagugccuaauuaaug

SEQ ID NO: 6997 - RNA, 19 nt, Influenza A virus
gaggagugccugauuaacg

SEQ ID NO: 6998 - RNA, 19 nt, Influenza A virus
agugccugguuaaugaucc

SEQ ID NO: 6999 - RNA, 19 nt, Influenza A virus
aaugccugauuaaugaucc

SEQ ID NO: 7000 - RNA, 19 nt, Influenza A virus
agugccuaauuaaugaucc

SEQ ID NO: 7001 - RNA, 19 nt, Influenza A virus
agugccugauuaacgaucc

SEQ ID NO: 7002 - RNA, 19 nt, Influenza A virus
uaugaagcaguugaggagu

SEQ ID NO: 7003 - RNA, 19 nt, Influenza A virus
uauggagcaauugaggagu

SEQ ID NO: 7004 - RNA, 19 nt, Influenza A virus
uaugaagcaauugaggaau

SEQ ID NO: 7005 - RNA, 19 nt, Influenza A virus
auaugaagcaguugaggag

SEQ ID NO: 7006 - RNA, 19 nt, Influenza A virus
auauggagcaauugaggag

SEQ ID NO: 7007 - RNA, 19 nt, Influenza A virus
auaugaagcaauugaggaa

SEQ ID NO: 7008 - RNA, 19 nt, Influenza A virus
augaagcaguugaggagug

SEQ ID NO: 7009 - RNA, 19 nt, Influenza A virus
auggagcaauugaggagug

SEQ ID NO: 7010 - RNA, 19 nt, Influenza A virus
augaagcaauugaggaaug

SEQ ID NO: 7011 - RNA, 19 nt, Influenza A virus
ugaagcaguugaggagugc

SEQ ID NO: 7012 - RNA, 19 nt, Influenza A virus
uggagcaauugaggagugc

SEQ ID NO: 7013 - RNA, 19 nt, Influenza A virus
ugaagcaauugaggaaugc

SEQ ID NO: 7014 - RNA, 19 nt, Influenza A virus
aagcaguugaggagugccu

SEQ ID NO: 7015 - RNA, 19 nt, Influenza A virus
gagcaauugaggagugccu

SEQ ID NO: 7016 - RNA, 19 nt, Influenza A virus
aagcaauugaggaaugccu

SEQ ID NO: 7017 - RNA, 19 nt, Influenza A virus
gaagcaguugaggagugcc

SEQ ID NO: 7018 - RNA, 19 nt, Influenza A virus
ggagcaauugaggagugcc

SEQ ID NO: 7019 - RNA, 19 nt, Influenza A virus
gaagcaauugaggaaugcc

SEQ ID NO: 7020 - RNA, 19 nt, Influenza A virus
acaaauuugcggcaauaug

SEQ ID NO: 7021 - RNA, 19 nt, Influenza A virus
acaaauucgcagcaauaug

SEQ ID NO: 7022 - RNA, 19 nt, Influenza A virus
acaaauuugcugcaauaug

SEQ ID NO: 7023 - RNA, 19 nt, Influenza A virus
acaaguuugcugcaauaug

SEQ ID NO: 7024 - RNA, 19 nt, Influenza A virus
acaaguucgcugcaauaug

SEQ ID NO: 7025 - RNA, 19 nt, Influenza A virus
aacaaauuugcggcaauau

SEQ ID NO: 7026 - RNA, 19 nt, Influenza A virus
aacaaauucgcagcaauau

SEQ ID NO: 7027 - RNA, 19 nt, Influenza A virus
aacaaauuugcugcaauau

SEQ ID NO: 7028 - RNA, 19 nt, Influenza A virus
aacaaguuugcugcaauau

SEQ ID NO: 7029 - RNA, 19 nt, Influenza A virus
aacaaguucgcugcaauau

SEQ ID NO: 7030 - RNA, 19 nt, Influenza A virus
gggcuauaugaagcaguug

SEQ ID NO: 7031 - RNA, 19 nt, Influenza A virus
gggcuauauggagcaauug

SEQ ID NO: 7032 - RNA, 19 nt, Influenza A virus
ggguuauaugaagcaauug

SEQ ID NO: 7033 - RNA, 19 nt, Influenza A virus
ggacuauaugaagcaauug

SEQ ID NO: 7034 - RNA, 19 nt, Influenza A virus
gcuauaugaagcaguugag

SEQ ID NO: 7035 - RNA, 19 nt, Influenza A virus
gcuauauggagcaauugag

SEQ ID NO: 7036 - RNA, 19 nt, Influenza A virus
guuauaugaagcaauugag

SEQ ID NO: 7037 - RNA, 19 nt, Influenza A virus
acuauaugaagcaauugag

SEQ ID NO: 7038 - RNA, 19 nt, Influenza A virus
ucauguauucggauuuuca

SEQ ID NO: 7039 - RNA, 19 nt, Influenza A virus
uuauguauucagauuuuca

SEQ ID NO: 7040 - RNA, 19 nt, Influenza A virus
ucauguacucagauuuuca

SEQ ID NO: 7041 - RNA, 19 nt, Influenza A virus
ucauguauucagacuuuca

SEQ ID NO: 7042 - RNA, 19 nt, Influenza A virus
ucauguauucagauuucca

SEQ ID NO: 7043 - RNA, 19 nt, Influenza A virus
ucauguauucggauuucca

SEQ ID NO: 7044 - RNA, 19 nt, Influenza A virus
ucauguauucagacuucca

SEQ ID NO: 7045 - RNA, 19 nt, Influenza A virus
ggcuauaugaagcaguuga

SEQ ID NO: 7046 - RNA, 19 nt, Influenza A virus
ggcuauauggagcaauuga

SEQ ID NO: 7047 - RNA, 19 nt, Influenza A virus
gguuauaugaagcaauuga

SEQ ID NO: 7048 - RNA, 19 nt, Influenza A virus
gacuauaugaagcaauuga

SEQ ID NO: 7049 - RNA, 19 nt, Influenza A virus
caaauuugcagcaauaugu

SEQ ID NO: 7050 - RNA, 19 nt, Influenza A virus
caaauuugcggcaauaugc

SEQ ID NO: 7051 - RNA, 19 nt, Influenza A virus
caaauucgcagcaauaugc

SEQ ID NO: 7052 - RNA, 19 nt, Influenza A virus
caaauuugcugcaauaugc

SEQ ID NO: 7053 - RNA, 19 nt, Influenza A virus
caaauuugcugcaauaugu

SEQ ID NO: 7054 - RNA, 19 nt, Influenza A virus
caaguuugcugcaauaugc

SEQ ID NO: 7055 - RNA, 19 nt, Influenza A virus
caaguucgcugcaauaugc

SEQ ID NO: 7056 - RNA, 19 nt, Influenza A virus
aaauuugcagcaauaugua

SEQ ID NO: 7057 - RNA, 19 nt, Influenza A virus
aaauuugcggcaauaugca

SEQ ID NO: 7058 - RNA, 19 nt, Influenza A virus
aaauucgcagcaauaugca

SEQ ID NO: 7059 - RNA, 19 nt, Influenza A virus
aaauuugcugcaauaugca

SEQ ID NO: 7060 - RNA, 19 nt, Influenza A virus
aaauuugcugcaauaugua

SEQ ID NO: 7061 - RNA, 19 nt, Influenza A virus
aaguuugcugcaauaugca

SEQ ID NO: 7062 - RNA, 19 nt, Influenza A virus
aaguucgcugcaauaugca

SEQ ID NO: 7063 - RNA, 19 nt, Influenza A virus
uucauguauucggauuuuc

SEQ ID NO: 7064 - RNA, 19 nt, Influenza A virus
uuuauguauucagauuuuc

SEQ ID NO: 7065 - RNA, 19 nt, Influenza A virus
cucauguauucagauuuuc

SEQ ID NO: 7066 - RNA, 19 nt, Influenza A virus
uucauguacucagauuuuc

SEQ ID NO: 7067 - RNA, 19 nt, Influenza A virus
uucauguauucagacuuuc

SEQ ID NO: 7068 - RNA, 19 nt, Influenza A virus
uucauguauucagauuucc

SEQ ID NO: 7069 - RNA, 19 nt, Influenza A virus
uucauguauucggauuucc

SEQ ID NO: 7070 - RNA, 19 nt, Influenza A virus
uucauguauucagacuucc

SEQ ID NO: 7071 - RNA, 19 nt, Influenza A virus
aauuugcagcaauaugcau

SEQ ID NO: 7072 - RNA, 19 nt, Influenza A virus
aauuugcagcaauauguac

SEQ ID NO: 7073 - RNA, 19 nt, Influenza A virus
aauuugcggcaauaugcac

SEQ ID NO: 7074 - RNA, 19 nt, Influenza A virus
aauucgcagcaauaugcac

SEQ ID NO: 7075 - RNA, 19 nt, Influenza A virus
aauuugcugcaauaugcac

SEQ ID NO: 7076 - RNA, 19 nt, Influenza A virus
aauuugcugcaauauguac

SEQ ID NO: 7077 - RNA, 19 nt, Influenza A virus
aguuugcugcaauaugcac

SEQ ID NO: 7078 - RNA, 19 nt, Influenza A virus
aguucgcugcaauaugcac

SEQ ID NO: 7079 - RNA, 19 nt, Influenza A virus
acaaacaaauuugcggcaa

SEQ ID NO: 7080 - RNA, 19 nt, Influenza A virus
acgaacaaauuugcagcaa

SEQ ID NO: 7081 - RNA, 19 nt, Influenza A virus
acaaacaaauucgcagcaa

SEQ ID NO: 7082 - RNA, 19 nt, Influenza A virus
acaaacaaauuugcugcaa

SEQ ID NO: 7083 - RNA, 19 nt, Influenza A virus
acuaacaaauuugcagcaa

SEQ ID NO: 7084 - RNA, 19 nt, Influenza A virus
acgaacaaauuugcugcaa

SEQ ID NO: 7085 - RNA, 19 nt, Influenza A virus
acgaacaaguuugcugcaa

SEQ ID NO: 7086 - RNA, 19 nt, Influenza A virus
acaaacaaguucgcugcaa

SEQ ID NO: 7087 - RNA, 19 nt, Influenza A virus
caaacaaauuugcggcaau

SEQ ID NO: 7088 - RNA, 19 nt, Influenza A virus
cgaacaaauuugcagcaau

SEQ ID NO: 7089 - RNA, 19 nt, Influenza A virus
caaacaaauucgcagcaau

SEQ ID NO: 7090 - RNA, 19 nt, Influenza A virus
caaacaaauuugcugcaau

SEQ ID NO: 7091 - RNA, 19 nt, Influenza A virus
cuaacaaauuugcagcaau

SEQ ID NO: 7092 - RNA, 19 nt, Influenza A virus
cgaacaaauuugcugcaau

SEQ ID NO: 7093 - RNA, 19 nt, Influenza A virus
cgaacaaguuugcugcaau

SEQ ID NO: 7094 - RNA, 19 nt, Influenza A virus
caaacaaguucgcugcaau

SEQ ID NO: 7095 - RNA, 19 nt, Influenza A virus
aaacaaauuugcggcaaua

SEQ ID NO: 7096 - RNA, 19 nt, Influenza A virus
gaacaaauuugcagcaaua

SEQ ID NO: 7097 - RNA, 19 nt, Influenza A virus
aaacaaauucgcagcaaua

SEQ ID NO: 7098 - RNA, 19 nt, Influenza A virus
aaacaaauuugcugcaaua

SEQ ID NO: 7099 - RNA, 19 nt, Influenza A virus
uaacaaauuugcagcaaua

SEQ ID NO: 7100 - RNA, 19 nt, Influenza A virus
gaacaaauuugcugcaaua

SEQ ID NO: 7101 - RNA, 19 nt, Influenza A virus
gaacaaguuugcugcaaua

SEQ ID NO: 7102 - RNA, 19 nt, Influenza A virus
aaacaaguucgcugcaaua

SEQ ID NO: 7103 - RNA, 19 nt, Influenza A virus
cuuuagagccuauguggau

SEQ ID NO: 7104 - RNA, 19 nt, Influenza A virus
uuuuaaagccuauguggau

SEQ ID NO: 7105 - RNA, 19 nt, Influenza A virus
uuuuagagccuauguagau

SEQ ID NO: 7106 - RNA, 19 nt, Influenza A virus
cuuuagaaccuauguggau

SEQ ID NO: 7107 - RNA, 19 nt, Influenza A virus
aguuuuagagccuaugugg

SEQ ID NO: 7108 - RNA, 19 nt, Influenza A virus
aacuuuagagccuaugugg

SEQ ID NO: 7109 - RNA, 19 nt, Influenza A virus
aauuuuaaagccuaugugg

SEQ ID NO: 7110 - RNA, 19 nt, Influenza A virus
aauuuuagagccuauguag

SEQ ID NO: 7111 - RNA, 19 nt, Influenza A virus
auuuuuagagccuaugugg

SEQ ID NO: 7112 - RNA, 19 nt, Influenza A virus
aacuuuagaaccuaugugg

SEQ ID NO: 7113 - RNA, 19 nt, Influenza A virus
accuuuagagccuaugugg

SEQ ID NO: 7114 - RNA, 19 nt, Influenza A virus
guuuuagagccuaugugga

SEQ ID NO: 7115 - RNA, 19 nt, Influenza A virus
acuuuagagccuaugugga

SEQ ID NO: 7116 - RNA, 19 nt, Influenza A virus
auuuuaaagccuaugugga

SEQ ID NO: 7117 - RNA, 19 nt, Influenza A virus
auuuuagagccuauguaga

SEQ ID NO: 7118 - RNA, 19 nt, Influenza A virus
uuuuuagagccuaugugga

SEQ ID NO: 7119 - RNA, 19 nt, Influenza A virus
acuuuagaaccuaugugga

SEQ ID NO: 7120 - RNA, 19 nt, Influenza A virus
ccuuuagagccuaugugga

SEQ ID NO: 7121 - RNA, 19 nt, Influenza A virus
guauucggauuuucauuuc

SEQ ID NO: 7122 - RNA, 19 nt, Influenza A virus
guacucagauuuucauuuc

SEQ ID NO: 7123 - RNA, 19 nt, Influenza A virus
guauucagacuuucauuuc

SEQ ID NO: 7124 - RNA, 19 nt, Influenza A virus
guauucagauuuucacuuc

SEQ ID NO: 7125 - RNA, 19 nt, Influenza A virus
guauucggauuuucacuuu

SEQ ID NO: 7126 - RNA, 19 nt, Influenza A virus
guauucagacuuccauuuc

SEQ ID NO: 7127 - RNA, 19 nt, Influenza A virus
guauucagauuuccacuuc

SEQ ID NO: 7128 - RNA, 19 nt, Influenza A virus
guauucagacuuccauuuu

SEQ ID NO: 7129 - RNA, 19 nt, Influenza A virus
guauucggauuuccacuuc

SEQ ID NO: 7130 - RNA, 19 nt, Influenza A virus
gcauccugugcagcgaugg

SEQ ID NO: 7131 - RNA, 19 nt, Influenza A virus
gcauccuguguagcaaugg

SEQ ID NO: 7132 - RNA, 19 nt, Influenza A virus
gcaucuugugcagcaaugg

SEQ ID NO: 7133 - RNA, 19 nt, Influenza A virus
gcguccugugcagcaaugg

SEQ ID NO: 7134 - RNA, 19 nt, Influenza A virus
gcauccugugcagccaugg

SEQ ID NO: 7135 - RNA, 19 nt, Influenza A virus
gcaucuugugcagccaugg

SEQ ID NO: 7136 - RNA, 19 nt, Influenza A virus
gcaucuugugcaguuaugg

SEQ ID NO: 7137 - RNA, 19 nt, Influenza A virus
augcauccugugcagcgau

SEQ ID NO: 7138 - RNA, 19 nt, Influenza A virus
augcauccuguguagcaau

SEQ ID NO: 7139 - RNA, 19 nt, Influenza A virus
augcaucuugugcagcaau

SEQ ID NO: 7140 - RNA, 19 nt, Influenza A virus
augcguccugugcagcaau

SEQ ID NO: 7141 - RNA, 19 nt, Influenza A virus
augcauccugugcagccau

SEQ ID NO: 7142 - RNA, 19 nt, Influenza A virus
augcaucuugugcagccau

SEQ ID NO: 7143 - RNA, 19 nt, Influenza A virus
augcaucuugugcaguuau

SEQ ID NO: 7144 - RNA, 19 nt, Influenza A virus
uauucggauuuucauuuca

SEQ ID NO: 7145 - RNA, 19 nt, Influenza A virus
uacucagauuuucauuuca

SEQ ID NO: 7146 - RNA, 19 nt, Influenza A virus
uauucagacuuucauuuca

SEQ ID NO: 7147 - RNA, 19 nt, Influenza A virus
uauucagauuuucacuuca

SEQ ID NO: 7148 - RNA, 19 nt, Influenza A virus
uauucggauuuucacuuua

SEQ ID NO: 7149 - RNA, 19 nt, Influenza A virus
uauucagacuuccauuuca

SEQ ID NO: 7150 - RNA, 19 nt, Influenza A virus
uauucagauuuccacuuca

SEQ ID NO: 7151 - RNA, 19 nt, Influenza A virus
uauucagacuuccauuuua

SEQ ID NO: 7152 - RNA, 19 nt, Influenza A virus
uauucggauuuccacuuca

SEQ ID NO: 7153 - RNA, 19 nt, Influenza A virus
gaaacaaacaaauuugcgg

SEQ ID NO: 7154 - RNA, 19 nt, Influenza A virus
gaaacgaacaaauuugcag

SEQ ID NO: 7155 - RNA, 19 nt, Influenza A virus
gagacaaacaaauuugcag

SEQ ID NO: 7156 - RNA, 19 nt, Influenza A virus
gaaacaaacaaauucgcag

SEQ ID NO: 7157 - RNA, 19 nt, Influenza A virus
gaaacaaacaaauuugcug

SEQ ID NO: 7158 - RNA, 19 nt, Influenza A virus
gaaacuaacaaauuugcag

SEQ ID NO: 7159 - RNA, 19 nt, Influenza A virus
gaaacgaacaaauuugcug

SEQ ID NO: 7160 - RNA, 19 nt, Influenza A virus
gaaacgaacaaguuugcug

SEQ ID NO: 7161 - RNA, 19 nt, Influenza A virus
gaaacaaacaaguucgcug

SEQ ID NO: 7162 - RNA, 19 nt, Influenza A virus
uguauucggauuuucauuu

SEQ ID NO: 7163 - RNA, 19 nt, Influenza A virus
uguacucagauuuucauuu

SEQ ID NO: 7164 - RNA, 19 nt, Influenza A virus
uguauucagacuuucauuu

SEQ ID NO: 7165 - RNA, 19 nt, Influenza A virus
uguauucagauuuucacuu

SEQ ID NO: 7166 - RNA, 19 nt, Influenza A virus
uguauucggauuuucacuu

SEQ ID NO: 7167 - RNA, 19 nt, Influenza A virus
uguauucagacuuccauuu

SEQ ID NO: 7168 - RNA, 19 nt, Influenza A virus
uguauucagauuuccacuu

SEQ ID NO: 7169 - RNA, 19 nt, Influenza A virus
uguauucggauuuccacuu

SEQ ID NO: 7170 - RNA, 19 nt, Influenza A virus
aaugcauccugugcagcga

SEQ ID NO: 7171 - RNA, 19 nt, Influenza A virus
aaugcauccuguguagcaa

SEQ ID NO: 7172 - RNA, 19 nt, Influenza A virus
aaugcaucuugugcagcaa

SEQ ID NO: 7173 - RNA, 19 nt, Influenza A virus
aaugcguccugugcagcaa

SEQ ID NO: 7174 - RNA, 19 nt, Influenza A virus
aaugcauccugugcagcca

SEQ ID NO: 7175 - RNA, 19 nt, Influenza A virus
aaugcaucuugugcagcca

SEQ ID NO: 7176 - RNA, 19 nt, Influenza A virus
aaugcaucuugugcaguua

SEQ ID NO: 7177 - RNA, 19 nt, Influenza A virus
aacaaacaaauuugcggca

SEQ ID NO: 7178 - RNA, 19 nt, Influenza A virus
aacgaacaaauuugcagca

SEQ ID NO: 7179 - RNA, 19 nt, Influenza A virus
gacaaacaaauuugcagca

SEQ ID NO: 7180 - RNA, 19 nt, Influenza A virus
aacaaacaaauucgcagca

SEQ ID NO: 7181 - RNA, 19 nt, Influenza A virus
aacaaacaaauuugcugca

SEQ ID NO: 7182 - RNA, 19 nt, Influenza A virus
aacuaacaaauuugcagca

SEQ ID NO: 7183 - RNA, 19 nt, Influenza A virus
aacgaacaaauuugcugca

SEQ ID NO: 7184 - RNA, 19 nt, Influenza A virus
aacgaacaaguuugcugca

SEQ ID NO: 7185 - RNA, 19 nt, Influenza A virus
aacaaacaaguucgcugca

SEQ ID NO: 7186 - RNA, 19 nt, Influenza A virus
aaacaaacaaauuugcggc

SEQ ID NO: 7187 - RNA, 19 nt, Influenza A virus
aaacgaacaaauuugcagc

SEQ ID NO: 7188 - RNA, 19 nt, Influenza A virus
agacaaacaaauuugcagc

SEQ ID NO: 7189 - RNA, 19 nt, Influenza A virus
aaacaaacaaauucgcagc

SEQ ID NO: 7190 - RNA, 19 nt, Influenza A virus
aaacaaacaaauuugcugc

SEQ ID NO: 7191 - RNA, 19 nt, Influenza A virus
aaacuaacaaauuugcagc

SEQ ID NO: 7192 - RNA, 19 nt, Influenza A virus
aaacgaacaaauuugcugc

SEQ ID NO: 7193 - RNA, 19 nt, Influenza A virus
aaacgaacaaguuugcugc

SEQ ID NO: 7194 - RNA, 19 nt, Influenza A virus
aaacaaacaaguucgcugc

SEQ ID NO: 7195 - RNA, 19 nt, Influenza A virus
cauccugugcagcgaugga

SEQ ID NO: 7196 - RNA, 19 nt, Influenza A virus
cauccuguguagcaaugga

SEQ ID NO: 7197 - RNA, 19 nt, Influenza A virus
caucuugugcagcaaugga

SEQ ID NO: 7198 - RNA, 19 nt, Influenza A virus
cguccugugcagcaaugga

SEQ ID NO: 7199 - RNA, 19 nt, Influenza A virus
cauccugugcagccaugga

SEQ ID NO: 7200 - RNA, 19 nt, Influenza A virus
caucuugugcagccaugga

SEQ ID NO: 7201 - RNA, 19 nt, Influenza A virus
caucuugugcaguuaugga

SEQ ID NO: 7202 - RNA, 19 nt, Influenza A virus
auucggauuuucauuucau

SEQ ID NO: 7203 - RNA, 19 nt, Influenza A virus
acucagauuuucauuucau

SEQ ID NO: 7204 - RNA, 19 nt, Influenza A virus
auucagacuuucauuucau

SEQ ID NO: 7205 - RNA, 19 nt, Influenza A virus
auucagauuuucacuucau

SEQ ID NO: 7206 - RNA, 19 nt, Influenza A virus
auucggauuuucacuuuau

SEQ ID NO: 7207 - RNA, 19 nt, Influenza A virus
auucagacuuccauuucau

SEQ ID NO: 7208 - RNA, 19 nt, Influenza A virus
auucagauuuccacuucau

SEQ ID NO: 7209 - RNA, 19 nt, Influenza A virus
auucagacuuccauuuuau

SEQ ID NO: 7210 - RNA, 19 nt, Influenza A virus
auucggauuuccacuucau

SEQ ID NO: 7211 - RNA, 19 nt, Influenza A virus
auguauucggauuuucauu

SEQ ID NO: 7212 - RNA, 19 nt, Influenza A virus
auguacucagauuuucauu

SEQ ID NO: 7213 - RNA, 19 nt, Influenza A virus
auguauucagacuuucauu

SEQ ID NO: 7214 - RNA, 19 nt, Influenza A virus
auguauucagauuuucacu

SEQ ID NO: 7215 - RNA, 19 nt, Influenza A virus
auguauucggauuuucacu

SEQ ID NO: 7216 - RNA, 19 nt, Influenza A virus
auguauucagacuuccauu

SEQ ID NO: 7217 - RNA, 19 nt, Influenza A virus
auguauucagauuuccacu

SEQ ID NO: 7218 - RNA, 19 nt, Influenza A virus
auguauucggauuuccacu

SEQ ID NO: 7219 - RNA, 19 nt, Influenza A virus
ugcauccugugcagcgaug

SEQ ID NO: 7220 - RNA, 19 nt, Influenza A virus
ugcauccuguguagcaaug

SEQ ID NO: 7221 - RNA, 19 nt, Influenza A virus
ugcaucuugugcagcaaug

SEQ ID NO: 7222 - RNA, 19 nt, Influenza A virus
ugcguccugugcagcaaug

SEQ ID NO: 7223 - RNA, 19 nt, Influenza A virus
ugcauccugugcagccaug

SEQ ID NO: 7224 - RNA, 19 nt, Influenza A virus
ugcaucuugugcagccaug

SEQ ID NO: 7225 - RNA, 19 nt, Influenza A virus
ugcaucuugugcaguuaug

SEQ ID NO: 7226 - RNA, 19 nt, Influenza A virus
cauguauucggauuuucau

SEQ ID NO: 7227 - RNA, 19 nt, Influenza A virus
uauguauucagauuuucau

SEQ ID NO: 7228 - RNA, 19 nt, Influenza A virus
cauguacucagauuuucau

SEQ ID NO: 7229 - RNA, 19 nt, Influenza A virus
cauguauucagacuuucau

SEQ ID NO: 7230 - RNA, 19 nt, Influenza A virus
cauguauucagauuuucac

SEQ ID NO: 7231 - RNA, 19 nt, Influenza A virus
cauguauucggauuuucac

SEQ ID NO: 7232 - RNA, 19 nt, Influenza A virus
cauguauucagacuuccau

SEQ ID NO: 7233 - RNA, 19 nt, Influenza A virus
cauguauucagauuuccac

SEQ ID NO: 7234 - RNA, 19 nt, Influenza A virus
cauguauucggauuuccac

SEQ ID NO: 7235 - RNA, 19 nt, Influenza A virus
agaguuuuagagccuaugu

SEQ ID NO: 7236 - RNA, 19 nt, Influenza A virus
aaaauuuuagagccuaugu

SEQ ID NO: 7237 - RNA, 19 nt, Influenza A virus
agaacuuuagagccuaugu

SEQ ID NO: 7238 - RNA, 19 nt, Influenza A virus
agaauuuuaaagccuaugu

SEQ ID NO: 7239 - RNA, 19 nt, Influenza A virus
agauuuuuagagccuaugu

SEQ ID NO: 7240 - RNA, 19 nt, Influenza A virus
aaaacuuuagagccuaugu

SEQ ID NO: 7241 - RNA, 19 nt, Influenza A virus
gagaguuuuagagccuaug

SEQ ID NO: 7242 - RNA, 19 nt, Influenza A virus
aagaauuuuagagccuaug

SEQ ID NO: 7243 - RNA, 19 nt, Influenza A virus
gaaaauuuuagagccuaug

SEQ ID NO: 7244 - RNA, 19 nt, Influenza A virus
gagaacuuuagagccuaug

SEQ ID NO: 7245 - RNA, 19 nt, Influenza A virus
gagaauuuuaaagccuaug

SEQ ID NO: 7246 - RNA, 19 nt, Influenza A virus
gagauuuuuagagccuaug

SEQ ID NO: 7247 - RNA, 19 nt, Influenza A virus
gaaaacuuuagagccuaug

SEQ ID NO: 7248 - RNA, 19 nt, Influenza A virus
gauuuucauuucauuaaug

SEQ ID NO: 7249 - RNA, 19 nt, Influenza A virus
gacuuucauuucaucaaug

SEQ ID NO: 7250 - RNA, 19 nt, Influenza A virus
gauuuucacuucaucaaug

SEQ ID NO: 7251 - RNA, 19 nt, Influenza A virus
gauuuucacuucaucgaug

SEQ ID NO: 7252 - RNA, 19 nt, Influenza A virus
gauuuccacuucaucaaug

SEQ ID NO: 7253 - RNA, 19 nt, Influenza A virus
ugagaguuuuagagccuau

SEQ ID NO: 7254 - RNA, 19 nt, Influenza A virus
uaagaauuuuagagccuau

SEQ ID NO: 7255 - RNA, 19 nt, Influenza A virus
ugaaaauuuuagagccuau

SEQ ID NO: 7256 - RNA, 19 nt, Influenza A virus
ugagaacuuuagagccuau

SEQ ID NO: 7257 - RNA, 19 nt, Influenza A virus
ugagaauuuuaaagccuau

SEQ ID NO: 7258 - RNA, 19 nt, Influenza A virus
ugagauuuuuagagccuau

SEQ ID NO: 7259 - RNA, 19 nt, Influenza A virus
ugaaaacuuuagagccuau

SEQ ID NO: 7260 - RNA, 19 nt, Influenza A virus
uugagaguuuuagagccua

SEQ ID NO: 7261 - RNA, 19 nt, Influenza A virus
uuaagaauuuuagagccua

SEQ ID NO: 7262 - RNA, 19 nt, Influenza A virus
uugaaaauuuuagagccua

SEQ ID NO: 7263 - RNA, 19 nt, Influenza A virus
uugagaacuuuagagccua

SEQ ID NO: 7264 - RNA, 19 nt, Influenza A virus
uugagaauuuuaaagccua

SEQ ID NO: 7265 - RNA, 19 nt, Influenza A virus
uugagauuuuuagagccua

SEQ ID NO: 7266 - RNA, 19 nt, Influenza A virus
uugaaaacuuuagagccua

SEQ ID NO: 7267 - RNA, 19 nt, Influenza A virus
auuuucauuucauuaauga

SEQ ID NO: 7268 - RNA, 19 nt, Influenza A virus
acuuucauuucaucaauga

SEQ ID NO: 7269 - RNA, 19 nt, Influenza A virus
auuuucacuucaucaauga

SEQ ID NO: 7270 - RNA, 19 nt, Influenza A virus
auuuucacuucaucgauga

SEQ ID NO: 7271 - RNA, 19 nt, Influenza A virus
auuuccacuucaucaauga

SEQ ID NO: 7272 - RNA, 19 nt, Influenza A virus
ucagauuuucauuucauua

SEQ ID NO: 7273 - RNA, 19 nt, Influenza A virus
ucggauuuucauuucauca

SEQ ID NO: 7274 - RNA, 19 nt, Influenza A virus
ucagacuuucauuucauca

SEQ ID NO: 7275 - RNA, 19 nt, Influenza A virus
ucagauuuucacuucauca

SEQ ID NO: 7276 - RNA, 19 nt, Influenza A virus
ucagauuuucacuucaucg

SEQ ID NO: 7277 - RNA, 19 nt, Influenza A virus
ucagauuuccacuucauca

SEQ ID NO: 7278 - RNA, 19 nt, Influenza A virus
ucggauuuccacuucauca

SEQ ID NO: 7279 - RNA, 19 nt, Influenza A virus
gaguuuuagagccuaugug

SEQ ID NO: 7280 - RNA, 19 nt, Influenza A virus
aaauuuuagagccuaugug

SEQ ID NO: 7281 - RNA, 19 nt, Influenza A virus
gaacuuuagagccuaugug

SEQ ID NO: 7282 - RNA, 19 nt, Influenza A virus
gaauuuuaaagccuaugug

SEQ ID NO: 7283 - RNA, 19 nt, Influenza A virus
gaauuuuagagccuaugua

SEQ ID NO: 7284 - RNA, 19 nt, Influenza A virus
gauuuuuagagccuaugug

SEQ ID NO: 7285 - RNA, 19 nt, Influenza A virus
aaacuuuagagccuaugug

SEQ ID NO: 7286 - RNA, 19 nt, Influenza A virus
cagauuuucauuucauuaa

SEQ ID NO: 7287 - RNA, 19 nt, Influenza A virus
cggauuuucauuucaucaa

SEQ ID NO: 7288 - RNA, 19 nt, Influenza A virus
cagacuuucauuucaucaa

SEQ ID NO: 7289 - RNA, 19 nt, Influenza A virus
cagauuuucacuucaucaa

SEQ ID NO: 7290 - RNA, 19 nt, Influenza A virus
cagauuuucacuucaucga

SEQ ID NO: 7291 - RNA, 19 nt, Influenza A virus
cagauuuccacuucaucaa

SEQ ID NO: 7292 - RNA, 19 nt, Influenza A virus
cggauuuccacuucaucaa

SEQ ID NO: 7293 - RNA, 19 nt, Influenza A virus
guucaggcucuuagggaua

SEQ ID NO: 7294 - RNA, 19 nt, Influenza A virus
guucaggcuuuuagggaca

SEQ ID NO: 7295 - RNA, 19 nt, Influenza A virus
auucaggcucuuagggaca

SEQ ID NO: 7296 - RNA, 19 nt, Influenza A virus
guccaggcucuuagggaca

SEQ ID NO: 7297 - RNA, 19 nt, Influenza A virus
guucaggcccuuagggaca

SEQ ID NO: 7298 - RNA, 19 nt, Influenza A virus
guucaggcucucagggaca

SEQ ID NO: 7299 - RNA, 19 nt, Influenza A virus
guucaggcucuuaaggaca

SEQ ID NO: 7300 - RNA, 19 nt, Influenza A virus
guucaggcucuuagagaca

SEQ ID NO: 7301 - RNA, 19 nt, Influenza A virus
guucaggcucuucgggaca

SEQ ID NO: 7302 - RNA, 19 nt, Influenza A virus
gcucaggcacuuagggaca

SEQ ID NO: 7303 - RNA, 19 nt, Influenza A virus
guucaagcacuuagggaca

SEQ ID NO: 7304 - RNA, 19 nt, Influenza A virus
guucaggcucuuaaggaaa

SEQ ID NO: 7305 - RNA, 19 nt, Influenza A virus
uucaggcucuuagggacag

SEQ ID NO: 7306 - RNA, 19 nt, Influenza A virus
uucaggcucuuagggauaa

SEQ ID NO: 7307 - RNA, 19 nt, Influenza A virus
uucaggcuuuuagggacaa

SEQ ID NO: 7308 - RNA, 19 nt, Influenza A virus
uccaggcucuuagggacaa

SEQ ID NO: 7309 - RNA, 19 nt, Influenza A virus
uucaggcccuuagggacaa

SEQ ID NO: 7310 - RNA, 19 nt, Influenza A virus
uucaggcucucagggacaa

SEQ ID NO: 7311 - RNA, 19 nt, Influenza A virus
uucaggcucuuaaggacaa

SEQ ID NO: 7312 - RNA, 19 nt, Influenza A virus
uucaggcucuuagagacaa

SEQ ID NO: 7313 - RNA, 19 nt, Influenza A virus
uucaggcucuucgggacaa

SEQ ID NO: 7314 - RNA, 19 nt, Influenza A virus
cucaggcacuuagggacaa

SEQ ID NO: 7315 - RNA, 19 nt, Influenza A virus
uucaagcacuuagggacaa

SEQ ID NO: 7316 - RNA, 19 nt, Influenza A virus
uucaggcucuuaaggaaaa

SEQ ID NO: 7317 - RNA, 19 nt, Influenza A virus
agauuuucauuucauuaau

SEQ ID NO: 7318 - RNA, 19 nt, Influenza A virus
ggauuuucauuucaucaau

SEQ ID NO: 7319 - RNA, 19 nt, Influenza A virus
agacuuucauuucaucaau

SEQ ID NO: 7320 - RNA, 19 nt, Influenza A virus
agauuuucacuucaucaau

SEQ ID NO: 7321 - RNA, 19 nt, Influenza A virus
agauuuucacuucaucgau

SEQ ID NO: 7322 - RNA, 19 nt, Influenza A virus
agauuuccacuucaucaau

SEQ ID NO: 7323 - RNA, 19 nt, Influenza A virus
ggauuuccacuucaucaau

SEQ ID NO: 7324 - RNA, 19 nt, Influenza A virus
uucagauuuucauuucauu

SEQ ID NO: 7325 - RNA, 19 nt, Influenza A virus
uucggauuuucauuucauc

SEQ ID NO: 7326 - RNA, 19 nt, Influenza A virus
cucagauuuucauuucauc

SEQ ID NO: 7327 - RNA, 19 nt, Influenza A virus
uucagacuuucauuucauc

SEQ ID NO: 7328 - RNA, 19 nt, Influenza A virus
uucagauuuucacuucauc

SEQ ID NO: 7329 - RNA, 19 nt, Influenza A virus
uucagauuuccacuucauc

SEQ ID NO: 7330 - RNA, 19 nt, Influenza A virus
uucagacuuccauuucauu

SEQ ID NO: 7331 - RNA, 19 nt, Influenza A virus
uucggauuuccacuucauc

SEQ ID NO: 7332 - RNA, 19 nt, Influenza A virus
agaggcgaagagacaauug

SEQ ID NO: 7333 - RNA, 19 nt, Influenza A virus
agaggcgaggaaacaauug

SEQ ID NO: 7334 - RNA, 19 nt, Influenza A virus
agaggcgaaaaaacaauug

SEQ ID NO: 7335 - RNA, 19 nt, Influenza A virus
agaggcgaagaaacaaucg

SEQ ID NO: 7336 - RNA, 19 nt, Influenza A virus
  modified_base (15)..(15): a, c, g, u, unknown or other
agaggcgaagaaacnauug

SEQ ID NO: 7337 - RNA, 19 nt, Influenza A virus
agaggagaagagacaauug

SEQ ID NO: 7338 - RNA, 19 nt, Influenza A virus
gaggcgaagagacaauuga

SEQ ID NO: 7339 - RNA, 19 nt, Influenza A virus
gaggcgaggaaacaauuga

SEQ ID NO: 7340 - RNA, 19 nt, Influenza A virus
gaggcgaaaaaacaauuga

SEQ ID NO: 7341 - RNA, 19 nt, Influenza A virus
gaggcgaagaaacaaucga

SEQ ID NO: 7342 - RNA, 19 nt, Influenza A virus
  modified_base (14)..(14): a, c, g, u, unknown or other
gaggcgaagaaacnauuga

SEQ ID NO: 7343 - RNA, 19 nt, Influenza A virus
gaggagaagagacaauuga

SEQ ID NO: 7344 - RNA, 19 nt, Influenza A virus
ggcgaagaaacaauugagg

SEQ ID NO: 7345 - RNA, 19 nt, Influenza A virus
ggcgaagagacaauugaag

SEQ ID NO: 7346 - RNA, 19 nt, Influenza A virus
ggcgaggaaacaauugaag

SEQ ID NO: 7347 - RNA, 19 nt, Influenza A virus
ggcgaaaaaacaauugaag

SEQ ID NO: 7348 - RNA, 19 nt, Influenza A virus
ggcgaagaaacaaucgaag

SEQ ID NO: 7349 - RNA, 19 nt, Influenza A virus
  modified_base (12)..(12): a, c, g, u, unknown or other
ggcgaagaaacnauugaag

SEQ ID NO: 7350 - RNA, 19 nt, Influenza A virus
ggagaagagacaauugaag

SEQ ID NO: 7351 - RNA, 19 nt, Influenza A virus
cgaagaaacaauugaggaa

SEQ ID NO: 7352 - RNA, 19 nt, Influenza A virus
cgaagagacaauugaagaa

SEQ ID NO: 7353 - RNA, 19 nt, Influenza A virus
cgaggaaacaauugaagaa

SEQ ID NO: 7354 - RNA, 19 nt, Influenza A virus
cgaaaaaacaauugaagaa

SEQ ID NO: 7355 - RNA, 19 nt, Influenza A virus
cgaagaaacaaucgaagaa

SEQ ID NO: 7356 - RNA, 19 nt, Influenza A virus
  modified_base (10)..(10): a, c, g, u, unknown or other
cgaagaaacnauugaagaa

SEQ ID NO: 7357 - RNA, 19 nt, Influenza A virus
agaagagacaauugaagaa

SEQ ID NO: 7358 - RNA, 19 nt, Influenza A virus
gcgaagaaacaauugagga

SEQ ID NO: 7359 - RNA, 19 nt, Influenza A virus
gcgaagagacaauugaaga

SEQ ID NO: 7360 - RNA, 19 nt, Influenza A virus
gcgaggaaacaauugaaga

SEQ ID NO: 7361 - RNA, 19 nt, Influenza A virus
gcgaaaaaacaauugaaga

SEQ ID NO: 7362 - RNA, 19 nt, Influenza A virus
gcgaagaaacaaucgaaga

SEQ ID NO: 7363 - RNA, 19 nt, Influenza A virus
  modified_base (11)..(11): a, c, g, u, unknown or other
gcgaagaaacnauugaaga

SEQ ID NO: 7364 - RNA, 19 nt, Influenza A virus
gagaagagacaauugaaga

SEQ ID NO: 7365 - RNA, 19 nt, Influenza A virus
aggcgaagaaacaauugag

SEQ ID NO: 7366 - RNA, 19 nt, Influenza A virus
aggcgaagagacaauugaa

SEQ ID NO: 7367 - RNA, 19 nt, Influenza A virus
aggcgaggaaacaauugaa

SEQ ID NO: 7368 - RNA, 19 nt, Influenza A virus
aggcgaaaaaacaauugaa

SEQ ID NO: 7369 - RNA, 19 nt, Influenza A virus
aggcgaagaaacaaucgaa

SEQ ID NO: 7370 - RNA, 19 nt, Influenza A virus
  modified_base (13)..(13): a, c, g, u, unknown or other
aggcgaagaaacnauugaa

SEQ ID NO: 7371 - RNA, 19 nt, Influenza A virus
aggagaagagacaauugaa

SEQ ID NO: 7372 - RNA, 19 nt, Influenza A virus
gaagaaacaauugaggaaa

SEQ ID NO: 7373 - RNA, 19 nt, Influenza A virus
gaagagacaauugaagaaa

SEQ ID NO: 7374 - RNA, 19 nt, Influenza A virus
gaggaaacaauugaagaaa

SEQ ID NO: 7375 - RNA, 19 nt, Influenza A virus
gaaaaaacaauugaagaaa

SEQ ID NO: 7376 - RNA, 19 nt, Influenza A virus
gaagaaacaaucgaagaaa

SEQ ID NO: 7377 - RNA, 19 nt, Influenza A virus
  modified_base (9)..(9): a, c, g, u, unknown or other
gaagaaacnauugaagaaa

SEQ ID NO: 7378 - RNA, 19 nt, Influenza A virus
aaaugaaaugggggaugga

SEQ ID NO: 7379 - RNA, 19 nt, Influenza A virus
agaugaaauggggaaugga

SEQ ID NO: 7380 - RNA, 19 nt, Influenza A virus
agaugaaaugggggaugga

SEQ ID NO: 7381 - RNA, 19 nt, Influenza A virus
aaaugaaauggggaauaga

SEQ ID NO: 7382 - RNA, 19 nt, Influenza A virus
aaaugaaauggggcaugga

SEQ ID NO: 7383 - RNA, 19 nt, Influenza A virus
aaaugaagugggguaugga

SEQ ID NO: 7384 - RNA, 19 nt, Influenza A virus
aaaaugaaaugggggaugg

SEQ ID NO: 7385 - RNA, 19 nt, Influenza A virus
aagaugaaauggggaaugg

SEQ ID NO: 7386 - RNA, 19 nt, Influenza A virus
aagaugaaaugggggaugg

SEQ ID NO: 7387 - RNA, 19 nt, Influenza A virus
aaaaugaaauggggaauag

SEQ ID NO: 7388 - RNA, 19 nt, Influenza A virus
aaaaugaaauggggcaugg

SEQ ID NO: 7389 - RNA, 19 nt, Influenza A virus
aaaaugaagugggguaugg

SEQ ID NO: 7390 - RNA, 19 nt, Influenza A virus
ugaaaugggggauggagau

SEQ ID NO: 7391 - RNA, 19 nt, Influenza A virus
ugaaauggggaauggaaau

SEQ ID NO: 7392 - RNA, 19 nt, Influenza A virus
ugaaauggggaauggagcu

SEQ ID NO: 7393 - RNA, 19 nt, Influenza A virus
ugaaaugggggauggaaau

SEQ ID NO: 7394 - RNA, 19 nt, Influenza A virus
ugaaaugggggauggauau

SEQ ID NO: 7395 - RNA, 19 nt, Influenza A virus
ugaaauggggaauagagcu

SEQ ID NO: 7396 - RNA, 19 nt, Influenza A virus
ugaaauggggcauggaaau

SEQ ID NO: 7397 - RNA, 19 nt, Influenza A virus
ugaagugggguauggaaau

SEQ ID NO: 7398 - RNA, 19 nt, Influenza A virus
aaugggggauggagaugag

SEQ ID NO: 7399 - RNA, 19 nt, Influenza A virus
aauggggaauggaaaugag

SEQ ID NO: 7400 - RNA, 19 nt, Influenza A virus
aauggggaauggagcugag

SEQ ID NO: 7401 - RNA, 19 nt, Influenza A virus
aaugggggauggaaaugag

SEQ ID NO: 7402 - RNA, 19 nt, Influenza A virus
aaugggggauggauaugag

SEQ ID NO: 7403 - RNA, 19 nt, Influenza A virus
aauggggaauagagcugag

SEQ ID NO: 7404 - RNA, 19 nt, Influenza A virus
aauggggcauggaaaugag

SEQ ID NO: 7405 - RNA, 19 nt, Influenza A virus
agugggguauggaaaugag

SEQ ID NO: 7406 - RNA, 19 nt, Influenza A virus
cacauuuucucguucacug

SEQ ID NO: 7407 - RNA, 19 nt, Influenza A virus
cacauuuuuucauucacug

SEQ ID NO: 7408 - RNA, 19 nt, Influenza A virus
cacauuuucucguuuacug

SEQ ID NO: 7409 - RNA, 19 nt, Influenza A virus
cacaucuucucauucacug

SEQ ID NO: 7410 - RNA, 19 nt, Influenza A virus
cacauuuucucauucaccg

SEQ ID NO: 7411 - RNA, 19 nt, Influenza A virus
cacauuuucucauucacua

SEQ ID NO: 7412 - RNA, 19 nt, Influenza A virus
cacauuuucuccuucacug

SEQ ID NO: 7413 - RNA, 19 nt, Influenza A virus
cacaucuuuucauucacug

SEQ ID NO: 7414 - RNA, 19 nt, Influenza A virus
cacauauucucauucacag

SEQ ID NO: 7415 - RNA, 19 nt, Influenza A virus
cacauauucucauucacgg

SEQ ID NO: 7416 - RNA, 19 nt, Influenza A virus
aaaugggggauggagauga

SEQ ID NO: 7417 - RNA, 19 nt, Influenza A virus
aaauggggaauggaaauga

SEQ ID NO: 7418 - RNA, 19 nt, Influenza A virus
aaauggggaauggagcuga

SEQ ID NO: 7419 - RNA, 19 nt, Influenza A virus
aaaugggggauggaaauga

SEQ ID NO: 7420 - RNA, 19 nt, Influenza A virus
aaaugggggauggauauga

SEQ ID NO: 7421 - RNA, 19 nt, Influenza A virus
aaauggggaauagagcuga

SEQ ID NO: 7422 - RNA, 19 nt, Influenza A virus
aaauggggcauggaaauga

SEQ ID NO: 7423 - RNA, 19 nt, Influenza A virus
aagugggguauggaaauga

SEQ ID NO: 7424 - RNA, 19 nt, Influenza A virus
gaaaugggggauggagaug

SEQ ID NO: 7425 - RNA, 19 nt, Influenza A virus
gaaauggggaauggaaaug

SEQ ID NO: 7426 - RNA, 19 nt, Influenza A virus
gaaauggggaauggagcug

SEQ ID NO: 7427 - RNA, 19 nt, Influenza A virus
gaaaugggggauggaaaug

SEQ ID NO: 7428 - RNA, 19 nt, Influenza A virus
gaaaugggggauggauaug

SEQ ID NO: 7429 - RNA, 19 nt, Influenza A virus
gaaauggggaauagagcug

SEQ ID NO: 7430 - RNA, 19 nt, Influenza A virus
gaaauggggcauggaaaug

SEQ ID NO: 7431 - RNA, 19 nt, Influenza A virus
gaagugggguauggaaaug

SEQ ID NO: 7432 - RNA, 19 nt, Influenza A virus
augaaaugggggauggaga

SEQ ID NO: 7433 - RNA, 19 nt, Influenza A virus
augaaauggggaauggaaa

SEQ ID NO: 7434 - RNA, 19 nt, Influenza A virus
augaaauggggaauggagc

SEQ ID NO: 7435 - RNA, 19 nt, Influenza A virus
augaaaugggggauggaaa

SEQ ID NO: 7436 - RNA, 19 nt, Influenza A virus
augaaaugggggauggaua

SEQ ID NO: 7437 - RNA, 19 nt, Influenza A virus
augaaauggggaauagagc

SEQ ID NO: 7438 - RNA, 19 nt, Influenza A virus
augaaauggggcauggaaa

SEQ ID NO: 7439 - RNA, 19 nt, Influenza A virus
augaagugggguauggaaa

SEQ ID NO: 7440 - RNA, 19 nt, Influenza A virus
acauuuucucguucacugg

SEQ ID NO: 7441 - RNA, 19 nt, Influenza A virus
acauuuuuucauucacugg

SEQ ID NO: 7442 - RNA, 19 nt, Influenza A virus
acauuuucucguuuacugg

SEQ ID NO: 7443 - RNA, 19 nt, Influenza A virus
acaucuucucauucacugg

SEQ ID NO: 7444 - RNA, 19 nt, Influenza A virus
acauuuucucauucaccgg

SEQ ID NO: 7445 - RNA, 19 nt, Influenza A virus
acauuuucucauucacuag

SEQ ID NO: 7446 - RNA, 19 nt, Influenza A virus
acauuuucucauucacuga

SEQ ID NO: 7447 - RNA, 19 nt, Influenza A virus
acauuuucuccuucacugg

SEQ ID NO: 7448 - RNA, 19 nt, Influenza A virus
acaucuuuucauucacugg

SEQ ID NO: 7449 - RNA, 19 nt, Influenza A virus
acauauucucauucacagg

SEQ ID NO: 7450 - RNA, 19 nt, Influenza A virus
acauauucucauucacggg

SEQ ID NO: 7451 - RNA, 19 nt, Influenza A virus
aaagaggcgaagagacaau

SEQ ID NO: 7452 - RNA, 19 nt, Influenza A virus
aaagaggcgaggaaacaau

SEQ ID NO: 7453 - RNA, 19 nt, Influenza A virus
agagaggcgaagaaacaau

SEQ ID NO: 7454 - RNA, 19 nt, Influenza A virus
agagaggcgaagagacaau

SEQ ID NO: 7455 - RNA, 19 nt, Influenza A virus
aaagaggcgaaaaaacaau

SEQ ID NO: 7456 - RNA, 19 nt, Influenza A virus
  modified_base (17)..(17): a, c, g, u, unknown or other
agagaggcgaagaaacnau

SEQ ID NO: 7457 - RNA, 19 nt, Influenza A virus
agagaggagaagagacaau

SEQ ID NO: 7458 - RNA, 19 nt, Influenza A virus
gaaagaggcgaagagacaa

SEQ ID NO: 7459 - RNA, 19 nt, Influenza A virus
gaaagaggcgaggaaacaa

SEQ ID NO: 7460 - RNA, 19 nt, Influenza A virus
gagagaggcgaagaaacaa

SEQ ID NO: 7461 - RNA, 19 nt, Influenza A virus
gagagaggcgaagagacaa

SEQ ID NO: 7462 - RNA, 19 nt, Influenza A virus
gaaagaggcgaaaaaacaa

SEQ ID NO: 7463 - RNA, 19 nt, Influenza A virus
  modified_base (18)..(18): a, c, g, u, unknown or other
gagagaggcgaagaaacna

SEQ ID NO: 7464 - RNA, 19 nt, Influenza A virus
gagagaggagaagagacaa

SEQ ID NO: 7465 - RNA, 19 nt, Influenza A virus
aaugaaaugggggauggag

SEQ ID NO: 7466 - RNA, 19 nt, Influenza A virus
gaugaaauggggaauggag

SEQ ID NO: 7467 - RNA, 19 nt, Influenza A virus
aaugaaauggggaauagag

SEQ ID NO: 7468 - RNA, 19 nt, Influenza A virus
aaugaaauggggaauggaa

SEQ ID NO: 7469 - RNA, 19 nt, Influenza A virus
aaugaaaugggggauggaa

SEQ ID NO: 7470 - RNA, 19 nt, Influenza A virus
gaugaaaugggggauggaa

SEQ ID NO: 7471 - RNA, 19 nt, Influenza A virus
gaugaaaugggggauggau

SEQ ID NO: 7472 - RNA, 19 nt, Influenza A virus
aaugaaauggggcauggaa

SEQ ID NO: 7473 - RNA, 19 nt, Influenza A virus
aaugaagugggguauggaa

SEQ ID NO: 7474 - RNA, 19 nt, Influenza A virus
uaaauuuugugagcaugga

SEQ ID NO: 7475 - RNA, 19 nt, Influenza A virus
uaaauuuugugaguaugga

SEQ ID NO: 7476 - RNA, 19 nt, Influenza A virus
ugaacuuugugaguaugga

SEQ ID NO: 7477 - RNA, 19 nt, Influenza A virus
uaaacuuuaugagcaugga

SEQ ID NO: 7478 - RNA, 19 nt, Influenza A virus
uaaauuuuguaaguaugga

SEQ ID NO: 7479 - RNA, 19 nt, Influenza A virus
aagaggcgaagagacaauu

SEQ ID NO: 7480 - RNA, 19 nt, Influenza A virus
aagaggcgaggaaacaauu

SEQ ID NO: 7481 - RNA, 19 nt, Influenza A virus
gagaggcgaagaaacaauu

SEQ ID NO: 7482 - RNA, 19 nt, Influenza A virus
gagaggcgaagagacaauu

SEQ ID NO: 7483 - RNA, 19 nt, Influenza A virus
aagaggcgaaaaaacaauu

SEQ ID NO: 7484 - RNA, 19 nt, Influenza A virus
aagaggcgaagaaacaauc

SEQ ID NO: 7485 - RNA, 19 nt, Influenza A virus
  modified_base (16)..(16): a, c, g, u, unknown or other
gagaggcgaagaaacnauu

SEQ ID NO: 7486 - RNA, 19 nt, Influenza A virus
gagaggagaagagacaauu

SEQ ID NO: 7487 - RNA, 19 nt, Influenza A virus
guaaauuuugugagcaugg

SEQ ID NO: 7488 - RNA, 19 nt, Influenza A virus
guaaauuuugugaguaugg

SEQ ID NO: 7489 - RNA, 19 nt, Influenza A virus
gugaacuuugugaguaugg

SEQ ID NO: 7490 - RNA, 19 nt, Influenza A virus
guaaacuuuaugagcaugg

SEQ ID NO: 7491 - RNA, 19 nt, Influenza A virus
guaaauuuuguaaguaugg

SEQ ID NO: 7492 - RNA, 19 nt, Influenza A virus
caguccgaaagaggcgagg

SEQ ID NO: 7493 - RNA, 19 nt, Influenza A virus
caguccgagagaggcgaag

SEQ ID NO: 7494 - RNA, 19 nt, Influenza A virus
cagucugaaagaggcgaag

SEQ ID NO: 7495 - RNA, 19 nt, Influenza A virus
caauccgaaagaggcgaag

SEQ ID NO: 7496 - RNA, 19 nt, Influenza A virus
cagucagaaagaggcgaag

SEQ ID NO: 7497 - RNA, 19 nt, Influenza A virus
caguccgaaagaggcgaaa

SEQ ID NO: 7498 - RNA, 19 nt, Influenza A virus
cuguccgaaagaggcgaag

SEQ ID NO: 7499 - RNA, 19 nt, Influenza A virus
caauccgagagaggcgaag

SEQ ID NO: 7500 - RNA, 19 nt, Influenza A virus
caguccgagagaggagaag

SEQ ID NO: 7501 - RNA, 19 nt, Influenza A virus
aguccgaaagaggcgagga

SEQ ID NO: 7502 - RNA, 19 nt, Influenza A virus
aguccgagagaggcgaaga

SEQ ID NO: 7503 - RNA, 19 nt, Influenza A virus
agucugaaagaggcgaaga

SEQ ID NO: 7504 - RNA, 19 nt, Influenza A virus
aauccgaaagaggcgaaga

SEQ ID NO: 7505 - RNA, 19 nt, Influenza A virus
agucagaaagaggcgaaga

SEQ ID NO: 7506 - RNA, 19 nt, Influenza A virus
aguccgaaagaggcgaaaa

SEQ ID NO: 7507 - RNA, 19 nt, Influenza A virus
uguccgaaagaggcgaaga

SEQ ID NO: 7508 - RNA, 19 nt, Influenza A virus
aauccgagagaggcgaaga

SEQ ID NO: 7509 - RNA, 19 nt, Influenza A virus
aguccgagagaggagaaga

SEQ ID NO: 7510 - RNA, 19 nt, Influenza A virus
cgaaagaggcgaagagaca

SEQ ID NO: 7511 - RNA, 19 nt, Influenza A virus
cgaaagaggcgaggaaaca

SEQ ID NO: 7512 - RNA, 19 nt, Influenza A virus
cgagagaggcgaagaaaca

SEQ ID NO: 7513 - RNA, 19 nt, Influenza A virus
ugaaagaggcgaagaaaca

SEQ ID NO: 7514 - RNA, 19 nt, Influenza A virus
cgagagaggcgaagagaca

SEQ ID NO: 7515 - RNA, 19 nt, Influenza A virus
agaaagaggcgaagaaaca

SEQ ID NO: 7516 - RNA, 19 nt, Influenza A virus
cgaaagaggcgaaaaaaca

SEQ ID NO: 7517 - RNA, 19 nt, Influenza A virus
  modified_base (19)..(19): a, c, g, u, unknown or other
cgagagaggcgaagaaacn

SEQ ID NO: 7518 - RNA, 19 nt, Influenza A virus
cgagagaggagaagagaca

SEQ ID NO: 7519 - RNA, 19 nt, Influenza A virus
ugguaaauuuugugagcau

SEQ ID NO: 7520 - RNA, 19 nt, Influenza A virus
ugguaaauuuugugaguau

SEQ ID NO: 7521 - RNA, 19 nt, Influenza A virus
uggugaacuuugugaguau

SEQ ID NO: 7522 - RNA, 19 nt, Influenza A virus
ugguaaacuuuaugagcau

SEQ ID NO: 7523 - RNA, 19 nt, Influenza A virus
uuguaaacuuugugagcau

SEQ ID NO: 7524 - RNA, 19 nt, Influenza A virus
uaguaaauuuugugagcau

SEQ ID NO: 7525 - RNA, 19 nt, Influenza A virus
ugguaaauuuuguaaguau

SEQ ID NO: 7526 - RNA, 19 nt, Influenza A virus
gugguaaauuuugugagca

SEQ ID NO: 7527 - RNA, 19 nt, Influenza A virus
gugguaaauuuugugagua

SEQ ID NO: 7528 - RNA, 19 nt, Influenza A virus
guggugaacuuugugagua

SEQ ID NO: 7529 - RNA, 19 nt, Influenza A virus
gugguaaacuuuaugagca

SEQ ID NO: 7530 - RNA, 19 nt, Influenza A virus
guuguaaacuuugugagca

SEQ ID NO: 7531 - RNA, 19 nt, Influenza A virus
guaguaaauuuugugagca

SEQ ID NO: 7532 - RNA, 19 nt, Influenza A virus
gugguaaauuuuguaagua

SEQ ID NO: 7533 - RNA, 19 nt, Influenza A virus
uuugugcgacaaugcuuua

SEQ ID NO: 7534 - RNA, 19 nt, Influenza A virus
uuugugcgacaauguuuca

SEQ ID NO: 7535 - RNA, 19 nt, Influenza A virus
uuugugcgacagugcuuca

SEQ ID NO: 7536 - RNA, 19 nt, Influenza A virus
uuugugcggcaaugcuuca

SEQ ID NO: 7537 - RNA, 19 nt, Influenza A virus
ugugugcgacaaugcuuca

SEQ ID NO: 7538 - RNA, 19 nt, Influenza A virus
uucgugcgacaaugcuuca

SEQ ID NO: 7539 - RNA, 19 nt, Influenza A virus
uuugugagacaaugcuuca

SEQ ID NO: 7540 - RNA, 19 nt, Influenza A virus
uuugugcgacaaugcuucu

SEQ ID NO: 7541 - RNA, 19 nt, Influenza A virus
uuugugggacaaugcuuca

SEQ ID NO: 7542 - RNA, 19 nt, Influenza A virus
uuuguacgacaaugcuuua

SEQ ID NO: 7543 - RNA, 19 nt, Influenza A virus
ucgucaguccgagagaggc

SEQ ID NO: 7544 - RNA, 19 nt, Influenza A virus
ucgucagucugaaagaggc

SEQ ID NO: 7545 - RNA, 19 nt, Influenza A virus
ucaucaguccgaaagaggc

SEQ ID NO: 7546 - RNA, 19 nt, Influenza A virus
ucgccaguccgaaagaggc

SEQ ID NO: 7547 - RNA, 19 nt, Influenza A virus
ucgucaauccgaaagaggc

SEQ ID NO: 7548 - RNA, 19 nt, Influenza A virus
ucgucagucagaaagaggc

SEQ ID NO: 7549 - RNA, 19 nt, Influenza A virus
ucgucuguccgaaagaggc

SEQ ID NO: 7550 - RNA, 19 nt, Influenza A virus
ucgucaauccgagagaggc

SEQ ID NO: 7551 - RNA, 19 nt, Influenza A virus
ucgucaguccgagagagga

SEQ ID NO: 7552 - RNA, 19 nt, Influenza A virus
uugugcgacaaugcuuuaa

SEQ ID NO: 7553 - RNA, 19 nt, Influenza A virus
uugugcgacaauguuucaa

SEQ ID NO: 7554 - RNA, 19 nt, Influenza A virus
uugugcgacagugcuucaa

SEQ ID NO: 7555 - RNA, 19 nt, Influenza A virus
uugugcggcaaugcuucaa

SEQ ID NO: 7556 - RNA, 19 nt, Influenza A virus
gugugcgacaaugcuucaa

SEQ ID NO: 7557 - RNA, 19 nt, Influenza A virus
ucgugcgacaaugcuucaa

SEQ ID NO: 7558 - RNA, 19 nt, Influenza A virus
uugugagacaaugcuucaa

SEQ ID NO: 7559 - RNA, 19 nt, Influenza A virus
uugugcgacaaugcuucua

SEQ ID NO: 7560 - RNA, 19 nt, Influenza A virus
uugugggacaaugcuucaa

SEQ ID NO: 7561 - RNA, 19 nt, Influenza A virus
uuguacgacaaugcuuuaa

SEQ ID NO: 7562 - RNA, 19 nt, Influenza A virus
uaagcgauuugaagcagua

SEQ ID NO: 7563 - RNA, 19 nt, Influenza A virus
uaagugauuugaagcaaua

SEQ ID NO: 7564 - RNA, 19 nt, Influenza A virus
uaggcgauuugaagcaaua

SEQ ID NO: 7565 - RNA, 19 nt, Influenza A virus
ugagcgauuugaagcaaua

SEQ ID NO: 7566 - RNA, 19 nt, Influenza A virus
uaggugauuugaagcaaua

SEQ ID NO: 7567 - RNA, 19 nt, Influenza A virus
caagcgauuugaagcaaua

SEQ ID NO: 7568 - RNA, 19 nt, Influenza A virus
uaagcgacuugaagcaaua

SEQ ID NO: 7569 - RNA, 19 nt, Influenza A virus
uaagcgaucugaagcaaua

SEQ ID NO: 7570 - RNA, 19 nt, Influenza A virus
uaagcgauuuaaagcaaua

SEQ ID NO: 7571 - RNA, 19 nt, Influenza A virus
uaagcgauuugaaacaaua

SEQ ID NO: 7572 - RNA, 19 nt, Influenza A virus
uuagcgauuugaagcaaua

SEQ ID NO: 7573 - RNA, 19 nt, Influenza A virus
uaggcgacuugaagcaaua

SEQ ID NO: 7574 - RNA, 19 nt, Influenza A virus
ucagcgauuuaaagcaaua

SEQ ID NO: 7575 - RNA, 19 nt, Influenza A virus
uucgucaguccgagagagg

SEQ ID NO: 7576 - RNA, 19 nt, Influenza A virus
uucgucagucugaaagagg

SEQ ID NO: 7577 - RNA, 19 nt, Influenza A virus
uucaucaguccgaaagagg

SEQ ID NO: 7578 - RNA, 19 nt, Influenza A virus
uucgccaguccgaaagagg

SEQ ID NO: 7579 - RNA, 19 nt, Influenza A virus
uucgucaauccgaaagagg

SEQ ID NO: 7580 - RNA, 19 nt, Influenza A virus
uucgucagucagaaagagg

SEQ ID NO: 7581 - RNA, 19 nt, Influenza A virus
uucgucuguccgaaagagg

SEQ ID NO: 7582 - RNA, 19 nt, Influenza A virus
uucgucaauccgagagagg

SEQ ID NO: 7583 - RNA, 19 nt, Influenza A virus
cgucaguccgagagaggcg

SEQ ID NO: 7584 - RNA, 19 nt, Influenza A virus
cgucagucugaaagaggcg

SEQ ID NO: 7585 - RNA, 19 nt, Influenza A virus
caucaguccgaaagaggcg

SEQ ID NO: 7586 - RNA, 19 nt, Influenza A virus
cgccaguccgaaagaggcg

SEQ ID NO: 7587 - RNA, 19 nt, Influenza A virus
cgucaauccgaaagaggcg

SEQ ID NO: 7588 - RNA, 19 nt, Influenza A virus
cgucagucagaaagaggcg

SEQ ID NO: 7589 - RNA, 19 nt, Influenza A virus
cgucuguccgaaagaggcg

SEQ ID NO: 7590 - RNA, 19 nt, Influenza A virus
cgucaauccgagagaggcg

SEQ ID NO: 7591 - RNA, 19 nt, Influenza A virus
cgucaguccgagagaggag

SEQ ID NO: 7592 - RNA, 19 nt, Influenza A virus
gucaguccgagagaggcga

SEQ ID NO: 7593 - RNA, 19 nt, Influenza A virus
gucagucugaaagaggcga

SEQ ID NO: 7594 - RNA, 19 nt, Influenza A virus
aucaguccgaaagaggcga

SEQ ID NO: 7595 - RNA, 19 nt, Influenza A virus
gccaguccgaaagaggcga

SEQ ID NO: 7596 - RNA, 19 nt, Influenza A virus
gucaauccgaaagaggcga

SEQ ID NO: 7597 - RNA, 19 nt, Influenza A virus
gucagucagaaagaggcga

SEQ ID NO: 7598 - RNA, 19 nt, Influenza A virus
gucuguccgaaagaggcga

SEQ ID NO: 7599 - RNA, 19 nt, Influenza A virus
gucaauccgagagaggcga

SEQ ID NO: 7600 - RNA, 19 nt, Influenza A virus
gucaguccgagagaggaga

SEQ ID NO: 7601 - RNA, 19 nt, Influenza A virus
ucaguccgaaagaggcgag

SEQ ID NO: 7602 - RNA, 19 nt, Influenza A virus
ucaguccgagagaggcgaa

SEQ ID NO: 7603 - RNA, 19 nt, Influenza A virus
ucagucugaaagaggcgaa

SEQ ID NO: 7604 - RNA, 19 nt, Influenza A virus
ccaguccgaaagaggcgaa

SEQ ID NO: 7605 - RNA, 19 nt, Influenza A virus
ucaauccgaaagaggcgaa

SEQ ID NO: 7606 - RNA, 19 nt, Influenza A virus
ucagucagaaagaggcgaa

SEQ ID NO: 7607 - RNA, 19 nt, Influenza A virus
ucuguccgaaagaggcgaa

SEQ ID NO: 7608 - RNA, 19 nt, Influenza A virus
ucaauccgagagaggcgaa

SEQ ID NO: 7609 - RNA, 19 nt, Influenza A virus
ucaguccgagagaggagaa

SEQ ID NO: 7610 - RNA, 19 nt, Influenza A virus
gguaaauuuugugagcaug

SEQ ID NO: 7611 - RNA, 19 nt, Influenza A virus
gguaaauuuugugaguaug

SEQ ID NO: 7612 - RNA, 19 nt, Influenza A virus
ggugaacuuugugaguaug

SEQ ID NO: 7613 - RNA, 19 nt, Influenza A virus
gguaaacuuuaugagcaug

SEQ ID NO: 7614 - RNA, 19 nt, Influenza A virus
uguaaacuuugugagcaug

SEQ ID NO: 7615 - RNA, 19 nt, Influenza A virus
aguaaauuuugugagcaug

SEQ ID NO: 7616 - RNA, 19 nt, Influenza A virus
gguaaauuuuguaaguaug

SEQ ID NO: 7617 - RNA, 19 nt, Influenza A virus
uccgaaagaggcgaagaga

SEQ ID NO: 7618 - RNA, 19 nt, Influenza A virus
uccgaaagaggcgaggaaa

SEQ ID NO: 7619 - RNA, 19 nt, Influenza A virus
uccgagagaggcgaagaaa

SEQ ID NO: 7620 - RNA, 19 nt, Influenza A virus
ucugaaagaggcgaagaaa

SEQ ID NO: 7621 - RNA, 19 nt, Influenza A virus
uccgagagaggcgaagaga

SEQ ID NO: 7622 - RNA, 19 nt, Influenza A virus
ucagaaagaggcgaagaaa

SEQ ID NO: 7623 - RNA, 19 nt, Influenza A virus
uccgaaagaggcgaaaaaa

SEQ ID NO: 7624 - RNA, 19 nt, Influenza A virus
uccgagagaggagaagaga

SEQ ID NO: 7625 - RNA, 19 nt, Influenza A virus
ccgaaagaggcgaagagac

SEQ ID NO: 7626 - RNA, 19 nt, Influenza A virus
ccgaaagaggcgaggaaac

SEQ ID NO: 7627 - RNA, 19 nt, Influenza A virus
ccgagagaggcgaagaaac

SEQ ID NO: 7628 - RNA, 19 nt, Influenza A virus
cugaaagaggcgaagaaac

SEQ ID NO: 7629 - RNA, 19 nt, Influenza A virus
ccgagagaggcgaagagac

SEQ ID NO: 7630 - RNA, 19 nt, Influenza A virus
cagaaagaggcgaagaaac

SEQ ID NO: 7631 - RNA, 19 nt, Influenza A virus
ccgaaagaggcgaaaaaac

SEQ ID NO: 7632 - RNA, 19 nt, Influenza A virus
ccgagagaggagaagagac

SEQ ID NO: 7633 - RNA, 19 nt, Influenza A virus
uuucgucaguccgagagag

SEQ ID NO: 7634 - RNA, 19 nt, Influenza A virus
uuucgucagucugaaagag

SEQ ID NO: 7635 - RNA, 19 nt, Influenza A virus
uuucaucaguccgaaagag

SEQ ID NO: 7636 - RNA, 19 nt, Influenza A virus
uuucgccaguccgaaagag

SEQ ID NO: 7637 - RNA, 19 nt, Influenza A virus
uuucgucaauccgaaagag

SEQ ID NO: 7638 - RNA, 19 nt, Influenza A virus
uuucgucagucagaaagag

SEQ ID NO: 7639 - RNA, 19 nt, Influenza A virus
uuucgucuguccgaaagag

SEQ ID NO: 7640 - RNA, 19 nt, Influenza A virus
uuucgucaauccgagagag

SEQ ID NO: 7641 - RNA, 19 nt, Influenza A virus
uccuuucgucaguccgaga

SEQ ID NO: 7642 - RNA, 19 nt, Influenza A virus
uccuuucgucagucugaaa

SEQ ID NO: 7643 - RNA, 19 nt, Influenza A virus
ucuuuucgucaguccgaaa

SEQ ID NO: 7644 - RNA, 19 nt, Influenza A virus
uccuuucaucaguccgaaa

SEQ ID NO: 7645 - RNA, 19 nt, Influenza A virus
uccuuucgccaguccgaaa

SEQ ID NO: 7646 - RNA, 19 nt, Influenza A virus
uccuuucgucaauccgaaa

SEQ ID NO: 7647 - RNA, 19 nt, Influenza A virus
uccuuucgucagucagaaa

SEQ ID NO: 7648 - RNA, 19 nt, Influenza A virus
uccuuucgucuguccgaaa

SEQ ID NO: 7649 - RNA, 19 nt, Influenza A virus
uccuuucgucaauccgaga

SEQ ID NO: 7650 - RNA, 19 nt, Influenza A virus
ccuuucgucaguccgagag

SEQ ID NO: 7651 - RNA, 19 nt, Influenza A virus
ccuuucgucagucugaaag

SEQ ID NO: 7652 - RNA, 19 nt, Influenza A virus
cuuuucgucaguccgaaag

SEQ ID NO: 7653 - RNA, 19 nt, Influenza A virus
ccuuucaucaguccgaaag

SEQ ID NO: 7654 - RNA, 19 nt, Influenza A virus
ccuuucgccaguccgaaag

SEQ ID NO: 7655 - RNA, 19 nt, Influenza A virus
ccuuucgucaauccgaaag

SEQ ID NO: 7656 - RNA, 19 nt, Influenza A virus
ccuuucgucagucagaaag

SEQ ID NO: 7657 - RNA, 19 nt, Influenza A virus
ccuuucgucuguccgaaag

SEQ ID NO: 7658 - RNA, 19 nt, Influenza A virus
ccuuucgucaauccgagag

SEQ ID NO: 7659 - RNA, 19 nt, Influenza A virus
gcgauuugaagcaguauga

SEQ ID NO: 7660 - RNA, 19 nt, Influenza A virus
gugauuugaagcaauauga

SEQ ID NO: 7661 - RNA, 19 nt, Influenza A virus
gcgacuugaagcaauauga

SEQ ID NO: 7662 - RNA, 19 nt, Influenza A virus
gcgaucugaagcaauauga

SEQ ID NO: 7663 - RNA, 19 nt, Influenza A virus
gcgauuuaaagcaauauga

SEQ ID NO: 7664 - RNA, 19 nt, Influenza A virus
gcgauuugaaacaauauga

SEQ ID NO: 7665 - RNA, 19 nt, Influenza A virus
gcgauuugaagcaauacga

SEQ ID NO: 7666 - RNA, 19 nt, Influenza A virus
gcgauuugaagcaauauaa

SEQ ID NO: 7667 - RNA, 19 nt, Influenza A virus
gcgacuugaagcaauauua

SEQ ID NO: 7668 - RNA, 19 nt, Influenza A virus
cuuucgucaguccgagaga

SEQ ID NO: 7669 - RNA, 19 nt, Influenza A virus
cuuucgucagucugaaaga

SEQ ID NO: 7670 - RNA, 19 nt, Influenza A virus
uuuucgucaguccgaaaga

SEQ ID NO: 7671 - RNA, 19 nt, Influenza A virus
cuuucaucaguccgaaaga

SEQ ID NO: 7672 - RNA, 19 nt, Influenza A virus
cuuucgccaguccgaaaga

SEQ ID NO: 7673 - RNA, 19 nt, Influenza A virus
cuuucgucaauccgaaaga

SEQ ID NO: 7674 - RNA, 19 nt, Influenza A virus
cuuucgucagucagaaaga

SEQ ID NO: 7675 - RNA, 19 nt, Influenza A virus
cuuucgucuguccgaaaga

SEQ ID NO: 7676 - RNA, 19 nt, Influenza A virus
cuuucgucaauccgagaga

SEQ ID NO: 7677 - RNA, 19 nt, Influenza A virus
aagcgauuugaagcaguau

SEQ ID NO: 7678 - RNA, 19 nt, Influenza A virus
aagugauuugaagcaauau

SEQ ID NO: 7679 - RNA, 19 nt, Influenza A virus
aggcgauuugaagcaauau

SEQ ID NO: 7680 - RNA, 19 nt, Influenza A virus
gagcgauuugaagcaauau

SEQ ID NO: 7681 - RNA, 19 nt, Influenza A virus
aggugauuugaagcaauau

SEQ ID NO: 7682 - RNA, 19 nt, Influenza A virus
aagcgacuugaagcaauau

SEQ ID NO: 7683 - RNA, 19 nt, Influenza A virus
aagcgaucugaagcaauau

SEQ ID NO: 7684 - RNA, 19 nt, Influenza A virus
aagcgauuuaaagcaauau

SEQ ID NO: 7685 - RNA, 19 nt, Influenza A virus
aagcgauuugaaacaauau

SEQ ID NO: 7686 - RNA, 19 nt, Influenza A virus
aagcgauuugaagcaauac

SEQ ID NO: 7687 - RNA, 19 nt, Influenza A virus
uagcgauuugaagcaauau

SEQ ID NO: 7688 - RNA, 19 nt, Influenza A virus
aggcgacuugaagcaauau

SEQ ID NO: 7689 - RNA, 19 nt, Influenza A virus
cagcgauuuaaagcaauau

SEQ ID NO: 7690 - RNA, 19 nt, Influenza A virus
aagauuuugugcgacagug

SEQ ID NO: 7691 - RNA, 19 nt, Influenza A virus
aagauuuugugcggcaaug

SEQ ID NO: 7692 - RNA, 19 nt, Influenza A virus
aggauuuugugcgacaaug

SEQ ID NO: 7693 - RNA, 19 nt, Influenza A virus
aagaauuugugcgacaaug

SEQ ID NO: 7694 - RNA, 19 nt, Influenza A virus
aagacuuugugcgacaaug

SEQ ID NO: 7695 - RNA, 19 nt, Influenza A virus
aagauuucgugcgacaaug

SEQ ID NO: 7696 - RNA, 19 nt, Influenza A virus
aagauuuuguacgacaaug

SEQ ID NO: 7697 - RNA, 19 nt, Influenza A virus
aagauuuugugagacaaug

SEQ ID NO: 7698 - RNA, 19 nt, Influenza A virus
aagauuuugugggacaaug

SEQ ID NO: 7699 - RNA, 19 nt, Influenza A virus
aagacuuugugcgacagug

SEQ ID NO: 7700 - RNA, 19 nt, Influenza A virus
aagacugugugcgacaaug

SEQ ID NO: 7701 - RNA, 19 nt, Influenza A virus
aagauuuugagggacaaug

SEQ ID NO: 7702 - RNA, 19 nt, Influenza A virus
agcgauuugaagcaguaug

SEQ ID NO: 7703 - RNA, 19 nt, Influenza A virus
agugauuugaagcaauaug

SEQ ID NO: 7704 - RNA, 19 nt, Influenza A virus
ggcgauuugaagcaauaug

SEQ ID NO: 7705 - RNA, 19 nt, Influenza A virus
ggugauuugaagcaauaug

SEQ ID NO: 7706 - RNA, 19 nt, Influenza A virus
agcgacuugaagcaauaug

SEQ ID NO: 7707 - RNA, 19 nt, Influenza A virus
agcgaucugaagcaauaug

SEQ ID NO: 7708 - RNA, 19 nt, Influenza A virus
agcgauuuaaagcaauaug

SEQ ID NO: 7709 - RNA, 19 nt, Influenza A virus
agcgauuugaaacaauaug

SEQ ID NO: 7710 - RNA, 19 nt, Influenza A virus
agcgauuugaagcaauacg

SEQ ID NO: 7711 - RNA, 19 nt, Influenza A virus
agcgauuugaagcaauaua

SEQ ID NO: 7712 - RNA, 19 nt, Influenza A virus
ggcgacuugaagcaauaug

SEQ ID NO: 7713 - RNA, 19 nt, Influenza A virus
agcgacuugaagcaauauu

SEQ ID NO: 7714 - RNA, 19 nt, Influenza A virus
guccgaaagaggcgaagag

SEQ ID NO: 7715 - RNA, 19 nt, Influenza A virus
guccgaaagaggcgaggaa

SEQ ID NO: 7716 - RNA, 19 nt, Influenza A virus
guccgagagaggcgaagaa

SEQ ID NO: 7717 - RNA, 19 nt, Influenza A virus
gucugaaagaggcgaagaa

SEQ ID NO: 7718 - RNA, 19 nt, Influenza A virus
guccgagagaggcgaagag

SEQ ID NO: 7719 - RNA, 19 nt, Influenza A virus
auccgaaagaggcgaagaa

SEQ ID NO: 7720 - RNA, 19 nt, Influenza A virus
gucagaaagaggcgaagaa

SEQ ID NO: 7721 - RNA, 19 nt, Influenza A virus
guccgaaagaggcgaaaaa

SEQ ID NO: 7722 - RNA, 19 nt, Influenza A virus
auccgaaagaggcgaagag

SEQ ID NO: 7723 - RNA, 19 nt, Influenza A virus
auccgagagaggcgaagag

SEQ ID NO: 7724 - RNA, 19 nt, Influenza A virus
guccgagagaggagaagag

SEQ ID NO: 7725 - RNA, 19 nt, Influenza A virus
ggcaagcuuucucagaugu

SEQ ID NO: 7726 - RNA, 19 nt, Influenza A virus
gguaagcuuucucaaaugu

SEQ ID NO: 7727 - RNA, 19 nt, Influenza A virus
ggcaaacuuucucaaaugu

SEQ ID NO: 7728 - RNA, 19 nt, Influenza A virus
ggcaagcugucucaaaugu

SEQ ID NO: 7729 - RNA, 19 nt, Influenza A virus
ggcaagcuuucacaaaugu

SEQ ID NO: 7730 - RNA, 19 nt, Influenza A virus
gguaagcuuucacaaaugu

SEQ ID NO: 7731 - RNA, 19 nt, Influenza A virus
acauucuuuggauggaagg

SEQ ID NO: 7732 - RNA, 19 nt, Influenza A virus
acauucuuuggguggaaag

SEQ ID NO: 7733 - RNA, 19 nt, Influenza A virus
acauuuuuuggauggaaag

SEQ ID NO: 7734 - RNA, 19 nt, Influenza A virus
acguucuuuggauggaaag

SEQ ID NO: 7735 - RNA, 19 nt, Influenza A virus
acauucuuuggguggaagg

SEQ ID NO: 7736 - RNA, 19 nt, Influenza A virus
acauucuucggauggaaag

SEQ ID NO: 7737 - RNA, 19 nt, Influenza A virus
acauucuuuggauggaaga

SEQ ID NO: 7738 - RNA, 19 nt, Influenza A virus
acauucuuuggcuggagag

SEQ ID NO: 7739 - RNA, 19 nt, Influenza A virus
acauuuuucggauggaaag

SEQ ID NO: 7740 - RNA, 19 nt, Influenza A virus
acauucuucggcuggagag

SEQ ID NO: 7741 - RNA, 19 nt, Influenza A virus
acauuuuucggcuggaaag

SEQ ID NO: 7742 - RNA, 19 nt, Influenza A virus
acauuuuucgguuggaaag

SEQ ID NO: 7743 - RNA, 19 nt, Influenza A virus
cauucuuuggauggaagga

SEQ ID NO: 7744 - RNA, 19 nt, Influenza A virus
cauucuuuggguggaaaga

SEQ ID NO: 7745 - RNA, 19 nt, Influenza A virus
cauuuuuuggauggaaaga

SEQ ID NO: 7746 - RNA, 19 nt, Influenza A virus
cguucuuuggauggaaaga

SEQ ID NO: 7747 - RNA, 19 nt, Influenza A virus
cauucuuuggguggaagga

SEQ ID NO: 7748 - RNA, 19 nt, Influenza A virus
cauucuucggauggaaaga

SEQ ID NO: 7749 - RNA, 19 nt, Influenza A virus
cauucuuuggauggaagaa

SEQ ID NO: 7750 - RNA, 19 nt, Influenza A virus
cauucuuuggcuggagaga

SEQ ID NO: 7751 - RNA, 19 nt, Influenza A virus
cauuuuucggauggaaaga

SEQ ID NO: 7752 - RNA, 19 nt, Influenza A virus
cauucuucggcuggagaga

SEQ ID NO: 7753 - RNA, 19 nt, Influenza A virus
cauuuuucggcuggaaaga

SEQ ID NO: 7754 - RNA, 19 nt, Influenza A virus
cauuuuucgguuggaaaga

SEQ ID NO: 7755 - RNA, 19 nt, Influenza A virus
gauuugaagcaguaugaua

SEQ ID NO: 7756 - RNA, 19 nt, Influenza A virus
gacuugaagcaauaugaua

SEQ ID NO: 7757 - RNA, 19 nt, Influenza A virus
gaucugaagcaauaugaua

SEQ ID NO: 7758 - RNA, 19 nt, Influenza A virus
gauuuaaagcaauaugaua

SEQ ID NO: 7759 - RNA, 19 nt, Influenza A virus
gauuugaaacaauaugaua

SEQ ID NO: 7760 - RNA, 19 nt, Influenza A virus
gauuugaagcaauacgaua

SEQ ID NO: 7761 - RNA, 19 nt, Influenza A virus
gauuugaagcaauauaaua

SEQ ID NO: 7762 - RNA, 19 nt, Influenza A virus
gauuugaagcaauaugaca

SEQ ID NO: 7763 - RNA, 19 nt, Influenza A virus
gacuugaagcaauauuaua

SEQ ID NO: 7764 - RNA, 19 nt, Influenza A virus
agggcaagcuuucucagau

SEQ ID NO: 7765 - RNA, 19 nt, Influenza A virus
aggguaagcuuucucaaau

SEQ ID NO: 7766 - RNA, 19 nt, Influenza A virus
aaggcaagcuuucucaaau

SEQ ID NO: 7767 - RNA, 19 nt, Influenza A virus
agggcaaacuuucucaaau

SEQ ID NO: 7768 - RNA, 19 nt, Influenza A virus
agggcaagcugucucaaau

SEQ ID NO: 7769 - RNA, 19 nt, Influenza A virus
agggcaagcuuucacaaau

SEQ ID NO: 7770 - RNA, 19 nt, Influenza A virus
aggguaagcuuucacaaau

SEQ ID NO: 7771 - RNA, 19 nt, Influenza A virus
uugaggguaagcuuucuca

SEQ ID NO: 7772 - RNA, 19 nt, Influenza A virus
uagagggcaagcuuucuca

SEQ ID NO: 7773 - RNA, 19 nt, Influenza A virus
uugaaggcaagcuuucuca

SEQ ID NO: 7774 - RNA, 19 nt, Influenza A virus
uugagggcaaacuuucuca

SEQ ID NO: 7775 - RNA, 19 nt, Influenza A virus
uugagggcaagcugucuca

SEQ ID NO: 7776 - RNA, 19 nt, Influenza A virus
uugagggcaagcuuucaca

SEQ ID NO: 7777 - RNA, 19 nt, Influenza A virus
uugaggguaagcuuucaca

SEQ ID NO: 7778 - RNA, 19 nt, Influenza A virus
auuugaagcaguaugauag

SEQ ID NO: 7779 - RNA, 19 nt, Influenza A virus
acuugaagcaauaugauag

SEQ ID NO: 7780 - RNA, 19 nt, Influenza A virus
aucugaagcaauaugauag

SEQ ID NO: 7781 - RNA, 19 nt, Influenza A virus
auuuaaagcaauaugauag

SEQ ID NO: 7782 - RNA, 19 nt, Influenza A virus
auuugaaacaauaugauag

SEQ ID NO: 7783 - RNA, 19 nt, Influenza A virus
auuugaagcaauacgauag

SEQ ID NO: 7784 - RNA, 19 nt, Influenza A virus
auuugaagcaauauaauag

SEQ ID NO: 7785 - RNA, 19 nt, Influenza A virus
auuugaagcaauaugacag

SEQ ID NO: 7786 - RNA, 19 nt, Influenza A virus
acuugaagcaauauuauag

SEQ ID NO: 7787 - RNA, 19 nt, Influenza A virus
auugaggguaagcuuucuc

SEQ ID NO: 7788 - RNA, 19 nt, Influenza A virus
auagagggcaagcuuucuc

SEQ ID NO: 7789 - RNA, 19 nt, Influenza A virus
auugaaggcaagcuuucuc

SEQ ID NO: 7790 - RNA, 19 nt, Influenza A virus
auugagggcaaacuuucuc

SEQ ID NO: 7791 - RNA, 19 nt, Influenza A virus
auugagggcaagcugucuc

SEQ ID NO: 7792 - RNA, 19 nt, Influenza A virus
auugagggcaagcuuucac

SEQ ID NO: 7793 - RNA, 19 nt, Influenza A virus
auugaggguaagcuuucac

SEQ ID NO: 7794 - RNA, 19 nt, Influenza A virus
gagggcaagcuuucucaga

SEQ ID NO: 7795 - RNA, 19 nt, Influenza A virus
gaggguaagcuuucucaaa

SEQ ID NO: 7796 - RNA, 19 nt, Influenza A virus
gaaggcaagcuuucucaaa

SEQ ID NO: 7797 - RNA, 19 nt, Influenza A virus
gagggcaaacuuucucaaa

SEQ ID NO: 7798 - RNA, 19 nt, Influenza A virus
gagggcaagcugucucaaa

SEQ ID NO: 7799 - RNA, 19 nt, Influenza A virus
gagggcaagcuuucacaaa

SEQ ID NO: 7800 - RNA, 19 nt, Influenza A virus
gaggguaagcuuucacaaa

SEQ ID NO: 7801 - RNA, 19 nt, Influenza A virus
gggcaagcuuucucagaug

SEQ ID NO: 7802 - RNA, 19 nt, Influenza A virus
ggguaagcuuucucaaaug

SEQ ID NO: 7803 - RNA, 19 nt, Influenza A virus
aggcaagcuuucucaaaug

SEQ ID NO: 7804 - RNA, 19 nt, Influenza A virus
gggcaaacuuucucaaaug

SEQ ID NO: 7805 - RNA, 19 nt, Influenza A virus
gggcaagcugucucaaaug

SEQ ID NO: 7806 - RNA, 19 nt, Influenza A virus
gggcaagcuuucacaaaug

SEQ ID NO: 7807 - RNA, 19 nt, Influenza A virus
ggguaagcuuucacaaaug

SEQ ID NO: 7808 - RNA, 19 nt, Influenza A virus
cauugaggguaagcuuucu

SEQ ID NO: 7809 - RNA, 19 nt, Influenza A virus
cauagagggcaagcuuucu

SEQ ID NO: 7810 - RNA, 19 nt, Influenza A virus
cauugaaggcaagcuuucu

SEQ ID NO: 7811 - RNA, 19 nt, Influenza A virus
cauugagggcaaacuuucu

SEQ ID NO: 7812 - RNA, 19 nt, Influenza A virus
cauugagggcaagcugucu

SEQ ID NO: 7813 - RNA, 19 nt, Influenza A virus
cauugagggcaagcuuuca

SEQ ID NO: 7814 - RNA, 19 nt, Influenza A virus
cauugaggguaagcuuuca

SEQ ID NO: 7815 - RNA, 19 nt, Influenza A virus
gcaagcuuucucaaauguu

SEQ ID NO: 7816 - RNA, 19 nt, Influenza A virus
gcaagcuuucucagauguc

SEQ ID NO: 7817 - RNA, 19 nt, Influenza A virus
guaagcuuucucaaauguc

SEQ ID NO: 7818 - RNA, 19 nt, Influenza A virus
gcaaacuuucucaaauguc

SEQ ID NO: 7819 - RNA, 19 nt, Influenza A virus
gcaagcugucucaaauguc

SEQ ID NO: 7820 - RNA, 19 nt, Influenza A virus
gcaagcuuucacaaauguc

SEQ ID NO: 7821 - RNA, 19 nt, Influenza A virus
gcaagcuuucucaaaugua

SEQ ID NO: 7822 - RNA, 19 nt, Influenza A virus
guaagcuuucacaaauguc

SEQ ID NO: 7823 - RNA, 19 nt, Influenza A virus
ugagggcaagcuuucucag

SEQ ID NO: 7824 - RNA, 19 nt, Influenza A virus
ugaggguaagcuuucucaa

SEQ ID NO: 7825 - RNA, 19 nt, Influenza A virus
agagggcaagcuuucucaa

SEQ ID NO: 7826 - RNA, 19 nt, Influenza A virus
ugaaggcaagcuuucucaa

SEQ ID NO: 7827 - RNA, 19 nt, Influenza A virus
ugagggcaaacuuucucaa

SEQ ID NO: 7828 - RNA, 19 nt, Influenza A virus
ugagggcaagcugucucaa

SEQ ID NO: 7829 - RNA, 19 nt, Influenza A virus
ugagggcaagcuuucacaa

SEQ ID NO: 7830 - RNA, 19 nt, Influenza A virus
ugaggguaagcuuucacaa

SEQ ID NO: 7831 - RNA, 19 nt, Influenza A virus
cagaaugaguucaauaagg

SEQ ID NO: 7832 - RNA, 19 nt, Influenza A virus
cagaaugaguuuaacaagg

SEQ ID NO: 7833 - RNA, 19 nt, Influenza A virus
cagagugaguucaacaagg

SEQ ID NO: 7834 - RNA, 19 nt, Influenza A virus
caaaaugaguucaacaagg

SEQ ID NO: 7835 - RNA, 19 nt, Influenza A virus
cagaaugaauucaacaagg

SEQ ID NO: 7836 - RNA, 19 nt, Influenza A virus
cagaaugaguucaacaaag

SEQ ID NO: 7837 - RNA, 19 nt, Influenza A virus
cagauugaguucaacaagg

SEQ ID NO: 7838 - RNA, 19 nt, Influenza A virus
cagaauggauucaacaagg

SEQ ID NO: 7839 - RNA, 19 nt, Influenza A virus
cagagugaauucaacaagg

SEQ ID NO: 7840 - RNA, 19 nt, Influenza A virus
agaaugaguucaauaaggc

SEQ ID NO: 7841 - RNA, 19 nt, Influenza A virus
agaaugaguuuaacaaggc

SEQ ID NO: 7842 - RNA, 19 nt, Influenza A virus
agagugaguucaacaaggc

SEQ ID NO: 7843 - RNA, 19 nt, Influenza A virus
aaaaugaguucaacaaggc

SEQ ID NO: 7844 - RNA, 19 nt, Influenza A virus
agaaugaauucaacaaggc

SEQ ID NO: 7845 - RNA, 19 nt, Influenza A virus
agaaugaguucaacaaagc

SEQ ID NO: 7846 - RNA, 19 nt, Influenza A virus
agauugaguucaacaaggc

SEQ ID NO: 7847 - RNA, 19 nt, Influenza A virus
agaauggauucaacaaggc

SEQ ID NO: 7848 - RNA, 19 nt, Influenza A virus
agagugaauucaacaaggc

SEQ ID NO: 7849 - RNA, 19 nt, Influenza A virus
auaagcgauuugaagcagu

SEQ ID NO: 7850 - RNA, 19 nt, Influenza A virus
auaagugauuugaagcaau

SEQ ID NO: 7851 - RNA, 19 nt, Influenza A virus
auaggcgauuugaagcaau

SEQ ID NO: 7852 - RNA, 19 nt, Influenza A virus
augagcgauuugaagcaau

SEQ ID NO: 7853 - RNA, 19 nt, Influenza A virus
guaagcgauuugaagcaau

SEQ ID NO: 7854 - RNA, 19 nt, Influenza A virus
guaggcgauuugaagcaau

SEQ ID NO: 7855 - RNA, 19 nt, Influenza A virus
guaggugauuugaagcaau

SEQ ID NO: 7856 - RNA, 19 nt, Influenza A virus
acaagcgauuugaagcaau

SEQ ID NO: 7857 - RNA, 19 nt, Influenza A virus
auaagcgacuugaagcaau

SEQ ID NO: 7858 - RNA, 19 nt, Influenza A virus
auaagcgauuuaaagcaau

SEQ ID NO: 7859 - RNA, 19 nt, Influenza A virus
auaagcgauuugaaacaau

SEQ ID NO: 7860 - RNA, 19 nt, Influenza A virus
auuagcgauuugaagcaau

SEQ ID NO: 7861 - RNA, 19 nt, Influenza A virus
auaggcgacuugaagcaau

SEQ ID NO: 7862 - RNA, 19 nt, Influenza A virus
guaagcgacuugaagcaau

SEQ ID NO: 7863 - RNA, 19 nt, Influenza A virus
guaagcgaucugaagcaau

SEQ ID NO: 7864 - RNA, 19 nt, Influenza A virus
aucagcgauuuaaagcaau

SEQ ID NO: 7865 - RNA, 19 nt, Influenza A virus
uucuuuggauggaaagagc

SEQ ID NO: 7866 - RNA, 19 nt, Influenza A virus
uucuuuggauggaaggaac

SEQ ID NO: 7867 - RNA, 19 nt, Influenza A virus
uucuuuggguggaaagaac

SEQ ID NO: 7868 - RNA, 19 nt, Influenza A virus
uuuuuuggauggaaagaac

SEQ ID NO: 7869 - RNA, 19 nt, Influenza A virus
uucuuuggguggaaggaac

SEQ ID NO: 7870 - RNA, 19 nt, Influenza A virus
uucuucggauggaaagaac

SEQ ID NO: 7871 - RNA, 19 nt, Influenza A virus
uucuuuggauggaagaaac

SEQ ID NO: 7872 - RNA, 19 nt, Influenza A virus
uucuuuggcuggagagagc

SEQ ID NO: 7873 - RNA, 19 nt, Influenza A virus
uuuuucggauggaaagagc

SEQ ID NO: 7874 - RNA, 19 nt, Influenza A virus
uuuuucggcuggaaagaac

SEQ ID NO: 7875 - RNA, 19 nt, Influenza A virus
cgauuugaagcaguaugau

SEQ ID NO: 7876 - RNA, 19 nt, Influenza A virus
ugauuugaagcaauaugau

SEQ ID NO: 7877 - RNA, 19 nt, Influenza A virus
cgacuugaagcaauaugau

SEQ ID NO: 7878 - RNA, 19 nt, Influenza A virus
cgaucugaagcaauaugau

SEQ ID NO: 7879 - RNA, 19 nt, Influenza A virus
cgauuuaaagcaauaugau

SEQ ID NO: 7880 - RNA, 19 nt, Influenza A virus
cgauuugaaacaauaugau

SEQ ID NO: 7881 - RNA, 19 nt, Influenza A virus
cgauuugaagcaauacgau

SEQ ID NO: 7882 - RNA, 19 nt, Influenza A virus
cgauuugaagcaauauaau

SEQ ID NO: 7883 - RNA, 19 nt, Influenza A virus
cgauuugaagcaauaugac

SEQ ID NO: 7884 - RNA, 19 nt, Influenza A virus
cgacuugaagcaauauuau

SEQ ID NO: 7885 - RNA, 19 nt, Influenza A virus
ucuuuggauggaaagagcc

SEQ ID NO: 7886 - RNA, 19 nt, Influenza A virus
ucuuuggauggaaggaacc

SEQ ID NO: 7887 - RNA, 19 nt, Influenza A virus
ucuuuggguggaaagaacc

SEQ ID NO: 7888 - RNA, 19 nt, Influenza A virus
uuuuuggauggaaagaacc

SEQ ID NO: 7889 - RNA, 19 nt, Influenza A virus
ucuuuggguggaaggaacc

SEQ ID NO: 7890 - RNA, 19 nt, Influenza A virus
ucuucggauggaaagaacc

SEQ ID NO: 7891 - RNA, 19 nt, Influenza A virus
ucuuuggauggaagaaacc

SEQ ID NO: 7892 - RNA, 19 nt, Influenza A virus
ucuuuggcuggagagagcc

SEQ ID NO: 7893 - RNA, 19 nt, Influenza A virus
uuuucggauggaaagagcc

SEQ ID NO: 7894 - RNA, 19 nt, Influenza A virus
uuuucggcuggaaagaacc

SEQ ID NO: 7895 - RNA, 19 nt, Influenza A virus
agccuauguggauggauuu

SEQ ID NO: 7896 - RNA, 19 nt, Influenza A virus
agccuauguggauggguuc

SEQ ID NO: 7897 - RNA, 19 nt, Influenza A virus
aaccuauguggauggauuc

SEQ ID NO: 7898 - RNA, 19 nt, Influenza A virus
agccuauguagauggauuc

SEQ ID NO: 7899 - RNA, 19 nt, Influenza A virus
agccuauguggauagauuc

SEQ ID NO: 7900 - RNA, 19 nt, Influenza A virus
agccuauguggauggauac

SEQ ID NO: 7901 - RNA, 19 nt, Influenza A virus
aaccuauguggauggauuu

SEQ ID NO: 7902 - RNA, 19 nt, Influenza A virus
caaugaaagaguaugggga

SEQ ID NO: 7903 - RNA, 19 nt, Influenza A virus
cgaugaaagaguauggaga

SEQ ID NO: 7904 - RNA, 19 nt, Influenza A virus
caaugaaggaguaugggga

SEQ ID NO: 7905 - RNA, 19 nt, Influenza A virus
caaugaaagaauauggaga

SEQ ID NO: 7906 - RNA, 19 nt, Influenza A virus
caaugaaagaguacggaga

SEQ ID NO: 7907 - RNA, 19 nt, Influenza A virus
caaugaaagaguuuggaga

SEQ ID NO: 7908 - RNA, 19 nt, Influenza A virus
caaugaaagaauaugggga

SEQ ID NO: 7909 - RNA, 19 nt, Influenza A virus
caaugaaggaauaugggga

SEQ ID NO: 7910 - RNA, 19 nt, Influenza A virus
caaugaaggaguacgggga

SEQ ID NO: 7911 - RNA, 19 nt, Influenza A virus
caaugaaagaacauggaga

SEQ ID NO: 7912 - RNA, 19 nt, Influenza A virus
ugaagcaguaugauaguga

SEQ ID NO: 7913 - RNA, 19 nt, Influenza A virus
uaaagcaauaugauaguga

SEQ ID NO: 7914 - RNA, 19 nt, Influenza A virus
ugaaacaauaugauaguga

SEQ ID NO: 7915 - RNA, 19 nt, Influenza A virus
ugaagcaauacgauaguga

SEQ ID NO: 7916 - RNA, 19 nt, Influenza A virus
ugaagcaauauaauaguga

SEQ ID NO: 7917 - RNA, 19 nt, Influenza A virus
ugaagcaauaugacaguga

SEQ ID NO: 7918 - RNA, 19 nt, Influenza A virus
ugaagcaauaugauagcga

SEQ ID NO: 7919 - RNA, 19 nt, Influenza A virus
ugaagcaauaugauaguaa

SEQ ID NO: 7920 - RNA, 19 nt, Influenza A virus
ugaagcaauauuauaguga

SEQ ID NO: 7921 - RNA, 19 nt, Influenza A virus
ugaagcaauaugacagcga

SEQ ID NO: 7922 - RNA, 19 nt, Influenza A virus
uggaagauuuugugcggca

SEQ ID NO: 7923 - RNA, 19 nt, Influenza A virus
uggaggauuuugugcgaca

SEQ ID NO: 7924 - RNA, 19 nt, Influenza A virus
uggaagaauuugugcgaca

SEQ ID NO: 7925 - RNA, 19 nt, Influenza A virus
uggaagacuuugugcgaca

SEQ ID NO: 7926 - RNA, 19 nt, Influenza A virus
uggaagauuucgugcgaca

SEQ ID NO: 7927 - RNA, 19 nt, Influenza A virus
uggaagauuuuguacgaca

SEQ ID NO: 7928 - RNA, 19 nt, Influenza A virus
uggaagauuuugugagaca

SEQ ID NO: 7929 - RNA, 19 nt, Influenza A virus
uggaagauuuugugggaca

SEQ ID NO: 7930 - RNA, 19 nt, Influenza A virus
uggaagacugugugcgaca

SEQ ID NO: 7931 - RNA, 19 nt, Influenza A virus
uggaagauuuugagggaca

SEQ ID NO: 7932 - RNA, 19 nt, Influenza A virus
auggaagauuuugugcggc

SEQ ID NO: 7933 - RNA, 19 nt, Influenza A virus
auggaggauuuugugcgac

SEQ ID NO: 7934 - RNA, 19 nt, Influenza A virus
auggaagaauuugugcgac

SEQ ID NO: 7935 - RNA, 19 nt, Influenza A virus
auggaagacuuugugcgac

SEQ ID NO: 7936 - RNA, 19 nt, Influenza A virus
auggaagauuucgugcgac

SEQ ID NO: 7937 - RNA, 19 nt, Influenza A virus
auggaagauuuuguacgac

SEQ ID NO: 7938 - RNA, 19 nt, Influenza A virus
auggaagauuuugugagac

SEQ ID NO: 7939 - RNA, 19 nt, Influenza A virus
auggaagauuuugugggac

SEQ ID NO: 7940 - RNA, 19 nt, Influenza A virus
auggaagacugugugcgac

SEQ ID NO: 7941 - RNA, 19 nt, Influenza A virus
auggaagauuuugagggac

SEQ ID NO: 7942 - RNA, 19 nt, Influenza A virus
aaagaguuuuuugagagua

SEQ ID NO: 7943 - RNA, 19 nt, Influenza A virus
aaagaguuuuuugaggaua

SEQ ID NO: 7944 - RNA, 19 nt, Influenza A virus
aaggaguuuuuugagaaua

SEQ ID NO: 7945 - RNA, 19 nt, Influenza A virus
aaagaauuuuuugagaaua

SEQ ID NO: 7946 - RNA, 19 nt, Influenza A virus
aaagaguuuuucgagaaua

SEQ ID NO: 7947 - RNA, 19 nt, Influenza A virus
aaagaguuuuuugaaaaua

SEQ ID NO: 7948 - RNA, 19 nt, Influenza A virus
aaagaguuuuuugagaaca

SEQ ID NO: 7949 - RNA, 19 nt, Influenza A virus
aaagauuuuuuugagaaua

SEQ ID NO: 7950 - RNA, 19 nt, Influenza A virus
  modified_base (5)..(5): a, c, g, u, unknown or other
aaagnguuuuuugagaaua

SEQ ID NO: 7951 - RNA, 19 nt, Influenza A virus
aaagaguucuuugagaaca

SEQ ID NO: 7952 - RNA, 19 nt, Influenza A virus
aaagaguuuuucaagaaua

SEQ ID NO: 7953 - RNA, 19 nt, Influenza A virus
uaaugaaggggguauacgu

SEQ ID NO: 7954 - RNA, 19 nt, Influenza A virus
uaaugaaggggguguacau

SEQ ID NO: 7955 - RNA, 19 nt, Influenza A virus
uagugaaggggguauacau

SEQ ID NO: 7956 - RNA, 19 nt, Influenza A virus
uaaugaaagggguauacau

SEQ ID NO: 7957 - RNA, 19 nt, Influenza A virus
uaaugaagggaguauacau

SEQ ID NO: 7958 - RNA, 19 nt, Influenza A virus
uaaugaaggggauauacau

SEQ ID NO: 7959 - RNA, 19 nt, Influenza A virus
uaaugaaggggguuuacau

SEQ ID NO: 7960 - RNA, 19 nt, Influenza A virus
uaaugaagggaguguacau

SEQ ID NO: 7961 - RNA, 19 nt, Influenza A virus
uaaugaagggaauauacau

SEQ ID NO: 7962 - RNA, 19 nt, Influenza A virus
gaagauuuugugcgacagu

SEQ ID NO: 7963 - RNA, 19 nt, Influenza A virus
gaagauuuugugcggcaau

SEQ ID NO: 7964 - RNA, 19 nt, Influenza A virus
gaggauuuugugcgacaau

SEQ ID NO: 7965 - RNA, 19 nt, Influenza A virus
gaagaauuugugcgacaau

SEQ ID NO: 7966 - RNA, 19 nt, Influenza A virus
gaagacuuugugcgacaau

SEQ ID NO: 7967 - RNA, 19 nt, Influenza A virus
gaagauuucgugcgacaau

SEQ ID NO: 7968 - RNA, 19 nt, Influenza A virus
gaagauuuuguacgacaau

SEQ ID NO: 7969 - RNA, 19 nt, Influenza A virus
gaagauuuugugagacaau

SEQ ID NO: 7970 - RNA, 19 nt, Influenza A virus
gaagauuuugugggacaau

SEQ ID NO: 7971 - RNA, 19 nt, Influenza A virus
gaagacuuugugcgacagu

SEQ ID NO: 7972 - RNA, 19 nt, Influenza A virus
gaagacugugugcgacaau

SEQ ID NO: 7973 - RNA, 19 nt, Influenza A virus
gaagauuuugagggacaau

SEQ ID NO: 7974 - RNA, 19 nt, Influenza A virus
ucuuauuucuucggggaca

SEQ ID NO: 7975 - RNA, 19 nt, Influenza A virus
ucuuauuucuuuggagaca

SEQ ID NO: 7976 - RNA, 19 nt, Influenza A virus
ucuuauuucuucggggaua

SEQ ID NO: 7977 - RNA, 19 nt, Influenza A virus
auuucuucggagacagugc

SEQ ID NO: 7978 - RNA, 19 nt, Influenza A virus
auuucuucggggacaaugc

SEQ ID NO: 7979 - RNA, 19 nt, Influenza A virus
auuucuuuggagacaaugc

SEQ ID NO: 7980 - RNA, 19 nt, Influenza A virus
auuucuucggggauaaugc

SEQ ID NO: 7981 - RNA, 19 nt, Influenza A virus
uauuucuucggagacagug

SEQ ID NO: 7982 - RNA, 19 nt, Influenza A virus
uauuucuucggggacaaug

SEQ ID NO: 7983 - RNA, 19 nt, Influenza A virus
uauuucuuuggagacaaug

SEQ ID NO: 7984 - RNA, 19 nt, Influenza A virus
uauuucuucggggauaaug

SEQ ID NO: 7985 - RNA, 19 nt, Influenza A virus
uuauuucuucggagacagu

SEQ ID NO: 7986 - RNA, 19 nt, Influenza A virus
uuauuucuucggggacaau

SEQ ID NO: 7987 - RNA, 19 nt, Influenza A virus
uuauuucuuuggagacaau

SEQ ID NO: 7988 - RNA, 19 nt, Influenza A virus
uuauuucuucggggauaau

SEQ ID NO: 7989 - RNA, 19 nt, Influenza A virus
cuuauuucuucggagacag

SEQ ID NO: 7990 - RNA, 19 nt, Influenza A virus
cuuauuucuucggggacaa

SEQ ID NO: 7991 - RNA, 19 nt, Influenza A virus
cuuauuucuuuggagacaa

SEQ ID NO: 7992 - RNA, 19 nt, Influenza A virus
cuuauuucuucggggauaa

SEQ ID NO: 7993 - RNA, 19 nt, Influenza A virus
uuucuucggagacagugca

SEQ ID NO: 7994 - RNA, 19 nt, Influenza A virus
uuucuucggggacaaugca

SEQ ID NO: 7995 - RNA, 19 nt, Influenza A virus
uuucuuuggagacaaugca

SEQ ID NO: 7996 - RNA, 19 nt, Influenza A virus
uuucuucggggauaaugca

SEQ ID NO: 7997 - RNA, 19 nt, Influenza A virus
augaagggucuuauuucuu

SEQ ID NO: 7998 - RNA, 19 nt, Influenza A virus
augagggaucuuauuucuu

SEQ ID NO: 7999 - RNA, 19 nt, Influenza A virus
augaggggucuuauuucuu

SEQ ID NO: 8000 - RNA, 19 nt, Influenza A virus
acgaaggaucuuauuucuu

SEQ ID NO: 8001 - RNA, 19 nt, Influenza A virus
augaagguucuuauuucuu

SEQ ID NO: 8002 - RNA, 19 nt, Influenza A virus
aaugaagggucuuauuucu

SEQ ID NO: 8003 - RNA, 19 nt, Influenza A virus
aaugagggaucuuauuucu

SEQ ID NO: 8004 - RNA, 19 nt, Influenza A virus
aaugaggggucuuauuucu

SEQ ID NO: 8005 - RNA, 19 nt, Influenza A virus
aacgaaggaucuuauuucu

SEQ ID NO: 8006 - RNA, 19 nt, Influenza A virus
aaugaagguucuuauuucu

SEQ ID NO: 8007 - RNA, 19 nt, Influenza A virus
uaugaggggucuuauuucu

SEQ ID NO: 8008 - RNA, 19 nt, Influenza A virus
gaaggaucuuauuucuuug

SEQ ID NO: 8009 - RNA, 19 nt, Influenza A virus
gaagggucuuauuucuucg

SEQ ID NO: 8010 - RNA, 19 nt, Influenza A virus
gagggaucuuauuucuucg

SEQ ID NO: 8011 - RNA, 19 nt, Influenza A virus
gaggggucuuauuucuucg

SEQ ID NO: 8012 - RNA, 19 nt, Influenza A virus
gaagguucuuauuucuucg

SEQ ID NO: 8013 - RNA, 19 nt, Influenza A virus
aaggaucuuauuucuuugg

SEQ ID NO: 8014 - RNA, 19 nt, Influenza A virus
aagggucuuauuucuucgg

SEQ ID NO: 8015 - RNA, 19 nt, Influenza A virus
agggaucuuauuucuucgg

SEQ ID NO: 8016 - RNA, 19 nt, Influenza A virus
aggggucuuauuucuucgg

SEQ ID NO: 8017 - RNA, 19 nt, Influenza A virus
aagguucuuauuucuucgg

SEQ ID NO: 8018 - RNA, 19 nt, Influenza A virus
ugaaggaucuuauuucuuu

SEQ ID NO: 8019 - RNA, 19 nt, Influenza A virus
ugaagggucuuauuucuuc

SEQ ID NO: 8020 - RNA, 19 nt, Influenza A virus
ugagggaucuuauuucuuc

SEQ ID NO: 8021 - RNA, 19 nt, Influenza A virus
ugaggggucuuauuucuuc

SEQ ID NO: 8022 - RNA, 19 nt, Influenza A virus
cgaaggaucuuauuucuuc

SEQ ID NO: 8023 - RNA, 19 nt, Influenza A virus
ugaagguucuuauuucuuc

SEQ ID NO: 8024 - RNA, 19 nt, Influenza A virus
uaaugaagggucuuauuuc

SEQ ID NO: 8025 - RNA, 19 nt, Influenza A virus
uaaugagggaucuuauuuc

SEQ ID NO: 8026 - RNA, 19 nt, Influenza A virus
uaaugaggggucuuauuuc

SEQ ID NO: 8027 - RNA, 19 nt, Influenza A virus
caaugaaggaucuuauuuc

SEQ ID NO: 8028 - RNA, 19 nt, Influenza A virus
uaacgaaggaucuuauuuc

SEQ ID NO: 8029 - RNA, 19 nt, Influenza A virus
uaaugaagguucuuauuuc

SEQ ID NO: 8030 - RNA, 19 nt, Influenza A virus
uuaugaggggucuuauuuc

SEQ ID NO: 8031 - RNA, 19 nt, Influenza A virus
uucuucggagacagugcag

SEQ ID NO: 8032 - RNA, 19 nt, Influenza A virus
uucuucggggacaaugcag

SEQ ID NO: 8033 - RNA, 19 nt, Influenza A virus
uucuuuggagacaaugcag

SEQ ID NO: 8034 - RNA, 19 nt, Influenza A virus
uucuucggggauaaugcag

SEQ ID NO: 8035 - RNA, 19 nt, Influenza A virus
uucuucggagacaaugcaa

SEQ ID NO: 8036 - RNA, 19 nt, Influenza A virus
ucuucggagacagugcaga

SEQ ID NO: 8037 - RNA, 19 nt, Influenza A virus
ucuucggggacaaugcaga

SEQ ID NO: 8038 - RNA, 19 nt, Influenza A virus
ucuuuggagacaaugcaga

SEQ ID NO: 8039 - RNA, 19 nt, Influenza A virus
ucuucggggauaaugcaga

SEQ ID NO: 8040 - RNA, 19 nt, Influenza A virus
ucuucggagacaaugcaaa

SEQ ID NO: 8041 - RNA, 19 nt, Influenza A virus
gaucuuauuucuucgggga

SEQ ID NO: 8042 - RNA, 19 nt, Influenza A virus
gaucuuauuucuuuggaga

SEQ ID NO: 8043 - RNA, 19 nt, Influenza A virus
ggucuuauuucuucggaga

SEQ ID NO: 8044 - RNA, 19 nt, Influenza A virus
guucuuauuucuucggaga

SEQ ID NO: 8045 - RNA, 19 nt, Influenza A virus
ggaucuuauuucuucgggg

SEQ ID NO: 8046 - RNA, 19 nt, Influenza A virus
ggaucuuauuucuuuggag

SEQ ID NO: 8047 - RNA, 19 nt, Influenza A virus
gggucuuauuucuucggag

SEQ ID NO: 8048 - RNA, 19 nt, Influenza A virus
gguucuuauuucuucggag

SEQ ID NO: 8049 - RNA, 19 nt, Influenza A virus
aucuuauuucuucggggac

SEQ ID NO: 8050 - RNA, 19 nt, Influenza A virus
aucuuauuucuuuggagac

SEQ ID NO: 8051 - RNA, 19 nt, Influenza A virus
gucuuauuucuucggagac

SEQ ID NO: 8052 - RNA, 19 nt, Influenza A virus
aucuuauuucuucggggau

SEQ ID NO: 8053 - RNA, 19 nt, Influenza A virus
uucuuauuucuucggagac

SEQ ID NO: 8054 - RNA, 19 nt, Influenza A virus
aggaucuuauuucuucggg

SEQ ID NO: 8055 - RNA, 19 nt, Influenza A virus
aggaucuuauuucuuugga

SEQ ID NO: 8056 - RNA, 19 nt, Influenza A virus
agggucuuauuucuucgga

SEQ ID NO: 8057 - RNA, 19 nt, Influenza A virus
gggaucuuauuucuucgga

SEQ ID NO: 8058 - RNA, 19 nt, Influenza A virus
ggggucuuauuucuucgga

SEQ ID NO: 8059 - RNA, 19 nt, Influenza A virus
agguucuuauuucuucgga

SEQ ID NO: 8060 - RNA, 19 nt, Influenza A virus
aguaaugaagggucuuauu

SEQ ID NO: 8061 - RNA, 19 nt, Influenza A virus
aguaaugagggaucuuauu

SEQ ID NO: 8062 - RNA, 19 nt, Influenza A virus
aauaaugaaggaucuuauu

SEQ ID NO: 8063 - RNA, 19 nt, Influenza A virus
agcaaugaaggaucuuauu

SEQ ID NO: 8064 - RNA, 19 nt, Influenza A virus
aguaacgaaggaucuuauu

SEQ ID NO: 8065 - RNA, 19 nt, Influenza A virus
aguaaugaagguucuuauu

SEQ ID NO: 8066 - RNA, 19 nt, Influenza A virus
aauaaugaggggucuuauu

SEQ ID NO: 8067 - RNA, 19 nt, Influenza A virus
guaaugaagggucuuauuu

SEQ ID NO: 8068 - RNA, 19 nt, Influenza A virus
guaaugagggaucuuauuu

SEQ ID NO: 8069 - RNA, 19 nt, Influenza A virus
auaaugaaggaucuuauuu

SEQ ID NO: 8070 - RNA, 19 nt, Influenza A virus
gcaaugaaggaucuuauuu

SEQ ID NO: 8071 - RNA, 19 nt, Influenza A virus
guaacgaaggaucuuauuu

SEQ ID NO: 8072 - RNA, 19 nt, Influenza A virus
guaaugaagguucuuauuu

SEQ ID NO: 8073 - RNA, 19 nt, Influenza A virus
auaaugaggggucuuauuu

SEQ ID NO: 8074 - RNA, 19 nt, Influenza A virus
augaguaaugaagggucuu

SEQ ID NO: 8075 - RNA, 19 nt, Influenza A virus
augaguaaugagggaucuu

SEQ ID NO: 8076 - RNA, 19 nt, Influenza A virus
auaaguaaugaaggaucuu

SEQ ID NO: 8077 - RNA, 19 nt, Influenza A virus
augaauaaugaaggaucuu

SEQ ID NO: 8078 - RNA, 19 nt, Influenza A virus
augagcaaugaaggaucuu

SEQ ID NO: 8079 - RNA, 19 nt, Influenza A virus
augaguaacgaaggaucuu

SEQ ID NO: 8080 - RNA, 19 nt, Influenza A virus
augaguaaugaagguucuu

SEQ ID NO: 8081 - RNA, 19 nt, Influenza A virus
augaauaaugaggggucuu

SEQ ID NO: 8082 - RNA, 19 nt, Influenza A virus
ugaguaaugaagggucuua

SEQ ID NO: 8083 - RNA, 19 nt, Influenza A virus
ugaguaaugagggaucuua

SEQ ID NO: 8084 - RNA, 19 nt, Influenza A virus
uaaguaaugaaggaucuua

SEQ ID NO: 8085 - RNA, 19 nt, Influenza A virus
ugaauaaugaaggaucuua

SEQ ID NO: 8086 - RNA, 19 nt, Influenza A virus
ugagcaaugaaggaucuua

SEQ ID NO: 8087 - RNA, 19 nt, Influenza A virus
ugaguaacgaaggaucuua

SEQ ID NO: 8088 - RNA, 19 nt, Influenza A virus
ugaguaaugaagguucuua

SEQ ID NO: 8089 - RNA, 19 nt, Influenza A virus
ugaauaaugaggggucuua

SEQ ID NO: 8090 - RNA, 19 nt, Influenza A virus
gaguaaugaagggucuuau

SEQ ID NO: 8091 - RNA, 19 nt, Influenza A virus
gaguaaugagggaucuuau

SEQ ID NO: 8092 - RNA, 19 nt, Influenza A virus
aaguaaugaaggaucuuau

SEQ ID NO: 8093 - RNA, 19 nt, Influenza A virus
gaauaaugaaggaucuuau

SEQ ID NO: 8094 - RNA, 19 nt, Influenza A virus
gagcaaugaaggaucuuau

SEQ ID NO: 8095 - RNA, 19 nt, Influenza A virus
gaguaacgaaggaucuuau

SEQ ID NO: 8096 - RNA, 19 nt, Influenza A virus
gaguaaugaagguucuuau

SEQ ID NO: 8097 - RNA, 19 nt, Influenza A virus
gaauaaugaggggucuuau

SEQ ID NO: 8098 - RNA, 19 nt, Influenza A virus
uacagauugcuucaaauga

SEQ ID NO: 8099 - RNA, 19 nt, Influenza A virus
ugcaaauugcuucaaauga

SEQ ID NO: 8100 - RNA, 19 nt, Influenza A virus
uacaaauugccucaaauga

SEQ ID NO: 8101 - RNA, 19 nt, Influenza A virus
uacaaauugcuucaaacga

SEQ ID NO: 8102 - RNA, 19 nt, Influenza A virus
uucaaauugcuucaaauga

SEQ ID NO: 8103 - RNA, 19 nt, Influenza A virus
uucagauugcuucaaauga

SEQ ID NO: 8104 - RNA, 19 nt, Influenza A virus
uucaaauagcuucaaauga

SEQ ID NO: 8105 - RNA, 19 nt, Influenza A virus
uucaaauugcuuccaauga

SEQ ID NO: 8106 - RNA, 19 nt, Influenza A virus
uucagauugcgucaaauga

SEQ ID NO: 8107 - RNA, 19 nt, Influenza A virus
uucagauugcuuccaauga

SEQ ID NO: 8108 - RNA, 19 nt, Influenza A virus
aauuucaaacagcugcgca

SEQ ID NO: 8109 - RNA, 19 nt, Influenza A virus
aauuucaaacggcugcaca

SEQ ID NO: 8110 - RNA, 19 nt, Influenza A virus
aauuucaagcagcugcaca

SEQ ID NO: 8111 - RNA, 19 nt, Influenza A virus
aauuucagacagcugcaca

SEQ ID NO: 8112 - RNA, 19 nt, Influenza A virus
aacuucaaacagcugcaca

SEQ ID NO: 8113 - RNA, 19 nt, Influenza A virus
aauuccaaacagcugcaca

SEQ ID NO: 8114 - RNA, 19 nt, Influenza A virus
aauuucaaacagcagcaca

SEQ ID NO: 8115 - RNA, 19 nt, Influenza A virus
aauuucaaacagcugcuca

SEQ ID NO: 8116 - RNA, 19 nt, Influenza A virus
aauuucaaacugcugcaca

SEQ ID NO: 8117 - RNA, 19 nt, Influenza A virus
aauuucaaacggcagcaca

SEQ ID NO: 8118 - RNA, 19 nt, Influenza A virus
aauuucagacagcugccca

SEQ ID NO: 8119 - RNA, 19 nt, Influenza A virus
aguuucagacagcugccca

SEQ ID NO: 8120 - RNA, 19 nt, Influenza A virus
aauuccaaacagcagcaca

SEQ ID NO: 8121 - RNA, 19 nt, Influenza A virus
aauuucagaccgcagcaca

SEQ ID NO: 8122 - RNA, 19 nt, Influenza A virus
aaauuucaaacagcugcgc

SEQ ID NO: 8123 - RNA, 19 nt, Influenza A virus
aaauuucaaacggcugcac

SEQ ID NO: 8124 - RNA, 19 nt, Influenza A virus
aaauuucaagcagcugcac

SEQ ID NO: 8125 - RNA, 19 nt, Influenza A virus
aaauuucagacagcugcac

SEQ ID NO: 8126 - RNA, 19 nt, Influenza A virus
aaacuucaaacagcugcac

SEQ ID NO: 8127 - RNA, 19 nt, Influenza A virus
aaauuccaaacagcugcac

SEQ ID NO: 8128 - RNA, 19 nt, Influenza A virus
aaauuucaaacagcagcac

SEQ ID NO: 8129 - RNA, 19 nt, Influenza A virus
aaauuucaaacagcugcuc

SEQ ID NO: 8130 - RNA, 19 nt, Influenza A virus
aaauuucaaacugcugcac

SEQ ID NO: 8131 - RNA, 19 nt, Influenza A virus
aaauuucaaacggcagcac

SEQ ID NO: 8132 - RNA, 19 nt, Influenza A virus
aaauuucagacagcugccc

SEQ ID NO: 8133 - RNA, 19 nt, Influenza A virus
aaguuucagacagcugccc

SEQ ID NO: 8134 - RNA, 19 nt, Influenza A virus
aaauuccaaacagcagcac

SEQ ID NO: 8135 - RNA, 19 nt, Influenza A virus
aaauuucagaccgcagcac

SEQ ID NO: 8136 - RNA, 19 nt, Influenza A virus
guacagauugcuucaaaug

SEQ ID NO: 8137 - RNA, 19 nt, Influenza A virus
gugcaaauugcuucaaaug

SEQ ID NO: 8138 - RNA, 19 nt, Influenza A virus
auacaaauugcuucaaaug

SEQ ID NO: 8139 - RNA, 19 nt, Influenza A virus
guacaaauugccucaaaug

SEQ ID NO: 8140 - RNA, 19 nt, Influenza A virus
guacaaauugcuucaaacg

SEQ ID NO: 8141 - RNA, 19 nt, Influenza A virus
guucaaauugcuucaaaug

SEQ ID NO: 8142 - RNA, 19 nt, Influenza A virus
guucagauugcuucaaaug

SEQ ID NO: 8143 - RNA, 19 nt, Influenza A virus
auucaaauugcuucaaaug

SEQ ID NO: 8144 - RNA, 19 nt, Influenza A virus
guucaaauagcuucaaaug

SEQ ID NO: 8145 - RNA, 19 nt, Influenza A virus
guucaaauugcuuccaaug

SEQ ID NO: 8146 - RNA, 19 nt, Influenza A virus
auucagauugcuucaaaug

SEQ ID NO: 8147 - RNA, 19 nt, Influenza A virus
guucagauugcgucaaaug

SEQ ID NO: 8148 - RNA, 19 nt, Influenza A virus
guucagauugcuuccaaug

SEQ ID NO: 8149 - RNA, 19 nt, Influenza A virus
auggugcuuucugcuuuug

SEQ ID NO: 8150 - RNA, 19 nt, Influenza A virus
augguacucucugcuuuug

SEQ ID NO: 8151 - RNA, 19 nt, Influenza A virus
auggugcuaucugcuuuug

SEQ ID NO: 8152 - RNA, 19 nt, Influenza A virus
auggugcucucagcuuuug

SEQ ID NO: 8153 - RNA, 19 nt, Influenza A virus
auggugcucucugccuuug

SEQ ID NO: 8154 - RNA, 19 nt, Influenza A virus
auggugcucucugcguuug

SEQ ID NO: 8155 - RNA, 19 nt, Influenza A virus
auggugcucucugcuuucg

SEQ ID NO: 8156 - RNA, 19 nt, Influenza A virus
augguacucucugcauuug

SEQ ID NO: 8157 - RNA, 19 nt, Influenza A virus
augguccucucugcauuug

SEQ ID NO: 8158 - RNA, 19 nt, Influenza A virus
augguucucucugcauuug

SEQ ID NO: 8159 - RNA, 19 nt, Influenza A virus
uggugcuuucugcuuuuga

SEQ ID NO: 8160 - RNA, 19 nt, Influenza A virus
ugguacucucugcuuuuga

SEQ ID NO: 8161 - RNA, 19 nt, Influenza A virus
uggugcuaucugcuuuuga

SEQ ID NO: 8162 - RNA, 19 nt, Influenza A virus
uggugcucucagcuuuuga

SEQ ID NO: 8163 - RNA, 19 nt, Influenza A virus
uggugcucucugccuuuga

SEQ ID NO: 8164 - RNA, 19 nt, Influenza A virus
uggugcucucugcguuuga

SEQ ID NO: 8165 - RNA, 19 nt, Influenza A virus
uggugcucucugcuuucga

SEQ ID NO: 8166 - RNA, 19 nt, Influenza A virus
ugguacucucugcauuuga

SEQ ID NO: 8167 - RNA, 19 nt, Influenza A virus
ugguccucucugcauuuga

SEQ ID NO: 8168 - RNA, 19 nt, Influenza A virus
ugguucucucugcauuuga

SEQ ID NO: 8169 - RNA, 19 nt, Influenza A virus
caagguaccaaacggucuu

SEQ ID NO: 8170 - RNA, 19 nt, Influenza A virus
cagggcaccaaacggucuu

SEQ ID NO: 8171 - RNA, 19 nt, Influenza A virus
caaggcaacaaacggucuu

SEQ ID NO: 8172 - RNA, 19 nt, Influenza A virus
caaggcaccaaacgaucuu

SEQ ID NO: 8173 - RNA, 19 nt, Influenza A virus
caaggcaccacacggucuu

SEQ ID NO: 8174 - RNA, 19 nt, Influenza A virus
aaaggcaccaaacgaucuu

SEQ ID NO: 8175 - RNA, 19 nt, Influenza A virus
caaggcaccaaacgaucau

SEQ ID NO: 8176 - RNA, 19 nt, Influenza A virus
caaggcaccaaacgauccu

SEQ ID NO: 8177 - RNA, 19 nt, Influenza A virus
aagguaccaaacggucuua

SEQ ID NO: 8178 - RNA, 19 nt, Influenza A virus
agggcaccaaacggucuua

SEQ ID NO: 8179 - RNA, 19 nt, Influenza A virus
aaggcaacaaacggucuua

SEQ ID NO: 8180 - RNA, 19 nt, Influenza A virus
aaggcaccaaacgaucuua

SEQ ID NO: 8181 - RNA, 19 nt, Influenza A virus
aaggcaccacacggucuua

SEQ ID NO: 8182 - RNA, 19 nt, Influenza A virus
aaggcaccaaacgaucaua

SEQ ID NO: 8183 - RNA, 19 nt, Influenza A virus
aaggcaccaaacgauccua

SEQ ID NO: 8184 - RNA, 19 nt, Influenza A virus
agagaaugugcaauauucu

SEQ ID NO: 8185 - RNA, 19 nt, Influenza A virus
agaggaugugcaacauucu

SEQ ID NO: 8186 - RNA, 19 nt, Influenza A virus
aaagaaugugcaacauucu

SEQ ID NO: 8187 - RNA, 19 nt, Influenza A virus
agagaaugugcaacauccu

SEQ ID NO: 8188 - RNA, 19 nt, Influenza A virus
auagaaugugcaacauucu

SEQ ID NO: 8189 - RNA, 19 nt, Influenza A virus
aaagaaugugcaauauucu

SEQ ID NO: 8190 - RNA, 19 nt, Influenza A virus
agagaaugugcaacguccu

SEQ ID NO: 8191 - RNA, 19 nt, Influenza A virus
agagaaugugcaauauccu

SEQ ID NO: 8192 - RNA, 19 nt, Influenza A virus
agaggaugugcaacauccu

SEQ ID NO: 8193 - RNA, 19 nt, Influenza A virus
gagagaaugugcaauauuc

SEQ ID NO: 8194 - RNA, 19 nt, Influenza A virus
gagaggaugugcaacauuc

SEQ ID NO: 8195 - RNA, 19 nt, Influenza A virus
gaaagaaugugcaacauuc

SEQ ID NO: 8196 - RNA, 19 nt, Influenza A virus
gagagaaugugcaacaucc

SEQ ID NO: 8197 - RNA, 19 nt, Influenza A virus
gauagaaugugcaacauuc

SEQ ID NO: 8198 - RNA, 19 nt, Influenza A virus
gaaagaaugugcaauauuc

SEQ ID NO: 8199 - RNA, 19 nt, Influenza A virus
gagagaaugugcaacgucc

SEQ ID NO: 8200 - RNA, 19 nt, Influenza A virus
gagagaaugugcaauaucc

SEQ ID NO: 8201 - RNA, 19 nt, Influenza A virus
gagaggaugugcaacaucc

SEQ ID NO: 8202 - RNA, 19 nt, Influenza A virus
auuucaaacagcugcacag

SEQ ID NO: 8203 - RNA, 19 nt, Influenza A virus
auuucaaacagcugcgcaa

SEQ ID NO: 8204 - RNA, 19 nt, Influenza A virus
auuucaaacggcugcacaa

SEQ ID NO: 8205 - RNA, 19 nt, Influenza A virus
auuucaagcagcugcacaa

SEQ ID NO: 8206 - RNA, 19 nt, Influenza A virus
auuucagacagcugcacag

SEQ ID NO: 8207 - RNA, 19 nt, Influenza A virus
acuucaaacagcugcacaa

SEQ ID NO: 8208 - RNA, 19 nt, Influenza A virus
auuccaaacagcugcacaa

SEQ ID NO: 8209 - RNA, 19 nt, Influenza A virus
auuucaaacagcagcacaa

SEQ ID NO: 8210 - RNA, 19 nt, Influenza A virus
auuucaaacagcugcucaa

SEQ ID NO: 8211 - RNA, 19 nt, Influenza A virus
auuucaaacugcugcacaa

SEQ ID NO: 8212 - RNA, 19 nt, Influenza A virus
auuucaaacggcagcacaa

SEQ ID NO: 8213 - RNA, 19 nt, Influenza A virus
auuucagacagcugcccag

SEQ ID NO: 8214 - RNA, 19 nt, Influenza A virus
auuccaaacagcagcacaa

SEQ ID NO: 8215 - RNA, 19 nt, Influenza A virus
auuucagaccgcagcacaa

SEQ ID NO: 8216 - RNA, 19 nt, Influenza A virus
uuucaaacagcugcacaga

SEQ ID NO: 8217 - RNA, 19 nt, Influenza A virus
uuucaaacagcugcgcaaa

SEQ ID NO: 8218 - RNA, 19 nt, Influenza A virus
uuucaaacggcugcacaaa

SEQ ID NO: 8219 - RNA, 19 nt, Influenza A virus
uuucaagcagcugcacaaa

SEQ ID NO: 8220 - RNA, 19 nt, Influenza A virus
uuucagacagcugcacaga

SEQ ID NO: 8221 - RNA, 19 nt, Influenza A virus
cuucaaacagcugcacaaa

SEQ ID NO: 8222 - RNA, 19 nt, Influenza A virus
uuccaaacagcugcacaaa

SEQ ID NO: 8223 - RNA, 19 nt, Influenza A virus
uuucaaacagcagcacaaa

SEQ ID NO: 8224 - RNA, 19 nt, Influenza A virus
uuucaaacagcugcucaaa

SEQ ID NO: 8225 - RNA, 19 nt, Influenza A virus
uuucaaacugcugcacaaa

SEQ ID NO: 8226 - RNA, 19 nt, Influenza A virus
uuucaaacggcagcacaaa

SEQ ID NO: 8227 - RNA, 19 nt, Influenza A virus
uuucagacagcugcccaga

SEQ ID NO: 8228 - RNA, 19 nt, Influenza A virus
uuccaaacagcagcacaaa

SEQ ID NO: 8229 - RNA, 19 nt, Influenza A virus
uuucaaacagcagcacaac

SEQ ID NO: 8230 - RNA, 19 nt, Influenza A virus
ggaacccagggaaugcuga

SEQ ID NO: 8231 - RNA, 19 nt, Influenza A virus
ggaauccaggaaaugcuga

SEQ ID NO: 8232 - RNA, 19 nt, Influenza A virus
gaaacccaggaaaugcuga

SEQ ID NO: 8233 - RNA, 19 nt, Influenza A virus
ggaacccaagaaaugcuga

SEQ ID NO: 8234 - RNA, 19 nt, Influenza A virus
ggaacccaggaaacgcuga

SEQ ID NO: 8235 - RNA, 19 nt, Influenza A virus
ggaacccaggaaauacuga

SEQ ID NO: 8236 - RNA, 19 nt, Influenza A virus
gaaacccagggaaugcuga

SEQ ID NO: 8237 - RNA, 19 nt, Influenza A virus
gaaauccagggaaugcuga

SEQ ID NO: 8238 - RNA, 19 nt, Influenza A virus
ggaauccugggaaugcuga

SEQ ID NO: 8239 - RNA, 19 nt, Influenza A virus
cgaacccgaucgugccuuc

SEQ ID NO: 8240 - RNA, 19 nt, Influenza A virus
cgaacccggucgugcccuc

SEQ ID NO: 8241 - RNA, 19 nt, Influenza A virus
cgagcccgaucgugcccuc

SEQ ID NO: 8242 - RNA, 19 nt, Influenza A virus
cgagcccgaucgugccuuc

SEQ ID NO: 8243 - RNA, 19 nt, Influenza A virus
cgaacccaaucgugcccuc

SEQ ID NO: 8244 - RNA, 19 nt, Influenza A virus
cgaaccccaucgugcccuc

SEQ ID NO: 8245 - RNA, 19 nt, Influenza A virus
cgaacccgaucguucccuc

SEQ ID NO: 8246 - RNA, 19 nt, Influenza A virus
cgaacccuaucgugcccuc

SEQ ID NO: 8247 - RNA, 19 nt, Influenza A virus
cggaacccagggaaugcug

SEQ ID NO: 8248 - RNA, 19 nt, Influenza A virus
cggaauccaggaaaugcug

SEQ ID NO: 8249 - RNA, 19 nt, Influenza A virus
uggaacccaggaaaugcug

SEQ ID NO: 8250 - RNA, 19 nt, Influenza A virus
cgaaacccaggaaaugcug

SEQ ID NO: 8251 - RNA, 19 nt, Influenza A virus
cggaacccaagaaaugcug

SEQ ID NO: 8252 - RNA, 19 nt, Influenza A virus
cggaacccaggaaacgcug

SEQ ID NO: 8253 - RNA, 19 nt, Influenza A virus
cggaacccaggaaauacug

SEQ ID NO: 8254 - RNA, 19 nt, Influenza A virus
cgaaacccagggaaugcug

SEQ ID NO: 8255 - RNA, 19 nt, Influenza A virus
cggaauccugggaaugcug

SEQ ID NO: 8256 - RNA, 19 nt, Influenza A virus
aaugcugagauugaagauc

SEQ ID NO: 8257 - RNA, 19 nt, Influenza A virus
aacgcugagaucgaagauc

SEQ ID NO: 8258 - RNA, 19 nt, Influenza A virus
aauacugagaucgaagauc

SEQ ID NO: 8259 - RNA, 19 nt, Influenza A virus
aaugcugaaaucgaagauc

SEQ ID NO: 8260 - RNA, 19 nt, Influenza A virus
aaugcugagauagaagauc

SEQ ID NO: 8261 - RNA, 19 nt, Influenza A virus
aaugcugaguucgaagauc

SEQ ID NO: 8262 - RNA, 19 nt, Influenza A virus
aacgcugagauugaagauc

SEQ ID NO: 8263 - RNA, 19 nt, Influenza A virus
aaugcugaaauugaagauc

SEQ ID NO: 8264 - RNA, 19 nt, Influenza A virus
aaugcugagauugaagacc

SEQ ID NO: 8265 - RNA, 19 nt, Influenza A virus
aaugcugaguacgaagauc

SEQ ID NO: 8266 - RNA, 19 nt, Influenza A virus
aacgcugaaauugaagauc

SEQ ID NO: 8267 - RNA, 19 nt, Influenza A virus
augcugagauugaagaucu

SEQ ID NO: 8268 - RNA, 19 nt, Influenza A virus
acgcugagaucgaagaucu

SEQ ID NO: 8269 - RNA, 19 nt, Influenza A virus
auacugagaucgaagaucu

SEQ ID NO: 8270 - RNA, 19 nt, Influenza A virus
augcugaaaucgaagaucu

SEQ ID NO: 8271 - RNA, 19 nt, Influenza A virus
augcugagauagaagaucu

SEQ ID NO: 8272 - RNA, 19 nt, Influenza A virus
augcugaguucgaagaucu

SEQ ID NO: 8273 - RNA, 19 nt, Influenza A virus
acgcugagauugaagaucu

SEQ ID NO: 8274 - RNA, 19 nt, Influenza A virus
augcugaaauugaagaucu

SEQ ID NO: 8275 - RNA, 19 nt, Influenza A virus
augcugagauugaagaccu

SEQ ID NO: 8276 - RNA, 19 nt, Influenza A virus
augcugaguacgaagaucu

SEQ ID NO: 8277 - RNA, 19 nt, Influenza A virus
acgcugaaauugaagaucu

SEQ ID NO: 8278 - RNA, 19 nt, Influenza A virus
gauucuacauccagaugug

SEQ ID NO: 8279 - RNA, 19 nt, Influenza A virus
gauucuacauucaaaugug

SEQ ID NO: 8280 - RNA, 19 nt, Influenza A virus
gauucuauauccaaaugug

SEQ ID NO: 8281 - RNA, 19 nt, Influenza A virus
gauuuuacauccaaaugug

SEQ ID NO: 8282 - RNA, 19 nt, Influenza A virus
gguucuacauccaaaugug

SEQ ID NO: 8283 - RNA, 19 nt, Influenza A virus
aauucuacauccaaaugug

SEQ ID NO: 8284 - RNA, 19 nt, Influenza A virus
gauucuacauacagaugug

SEQ ID NO: 8285 - RNA, 19 nt, Influenza A virus
gguucuacauacagaugug

SEQ ID NO: 8286 - RNA, 19 nt, Influenza A virus
aauucuacauacaaaugug

SEQ ID NO: 8287 - RNA, 19 nt, Influenza A virus
gcugagauugaagaucuca

SEQ ID NO: 8288 - RNA, 19 nt, Influenza A virus
gcugagauugaagaucuua

SEQ ID NO: 8289 - RNA, 19 nt, Influenza A virus
acugagaucgaagaucuca

SEQ ID NO: 8290 - RNA, 19 nt, Influenza A virus
gcugaaaucgaagaucuca

SEQ ID NO: 8291 - RNA, 19 nt, Influenza A virus
gcugagauagaagaucuca

SEQ ID NO: 8292 - RNA, 19 nt, Influenza A virus
gcugagaucgaagaucuaa

SEQ ID NO: 8293 - RNA, 19 nt, Influenza A virus
gcugaguucgaagaucuca

SEQ ID NO: 8294 - RNA, 19 nt, Influenza A virus
gcugaaauugaagaucuca

SEQ ID NO: 8295 - RNA, 19 nt, Influenza A virus
gcugaaauugaagaucuua

SEQ ID NO: 8296 - RNA, 19 nt, Influenza A virus
gcugagauugaagaccuua

SEQ ID NO: 8297 - RNA, 19 nt, Influenza A virus
gcugaguacgaagaucuca

SEQ ID NO: 8298 - RNA, 19 nt, Influenza A virus
ucauggcagcauucauugg

SEQ ID NO: 8299 - RNA, 19 nt, Influenza A virus
ucauggcagcauucgcugg

SEQ ID NO: 8300 - RNA, 19 nt, Influenza A virus
ucauggcagcauuuacugg

SEQ ID NO: 8301 - RNA, 19 nt, Influenza A virus
ucauggcagcguucacugg

SEQ ID NO: 8302 - RNA, 19 nt, Influenza A virus
uuauggcagcauucacugg

SEQ ID NO: 8303 - RNA, 19 nt, Influenza A virus
ucauggcagcauucaccgg

SEQ ID NO: 8304 - RNA, 19 nt, Influenza A virus
ucauggcagcuuucacugg

SEQ ID NO: 8305 - RNA, 19 nt, Influenza A virus
ucauggcugcauucacugg

SEQ ID NO: 8306 - RNA, 19 nt, Influenza A virus
uuauggcagcauucaaugg

SEQ ID NO: 8307 - RNA, 19 nt, Influenza A virus
uuauggcagcauuuacagg

SEQ ID NO: 8308 - RNA, 19 nt, Influenza A virus
uuauggcagcuuucauugg

SEQ ID NO: 8309 - RNA, 19 nt, Influenza A virus
uuauggcagcuuucgcugg

SEQ ID NO: 8310 - RNA, 19 nt, Influenza A virus
ucauggcggccuucacagg

SEQ ID NO: 8311 - RNA, 19 nt, Influenza A virus
ucauugcagcauuuacagg

SEQ ID NO: 8312 - RNA, 19 nt, Influenza A virus
aauggugcuuucugcuuuu

SEQ ID NO: 8313 - RNA, 19 nt, Influenza A virus
gauggugcucucugcuuuu

SEQ ID NO: 8314 - RNA, 19 nt, Influenza A virus
aaugguacucucugcuuuu

SEQ ID NO: 8315 - RNA, 19 nt, Influenza A virus
aauggugcuaucugcuuuu

SEQ ID NO: 8316 - RNA, 19 nt, Influenza A virus
aauggugcucucagcuuuu

SEQ ID NO: 8317 - RNA, 19 nt, Influenza A virus
aauggugcucucugccuuu

SEQ ID NO: 8318 - RNA, 19 nt, Influenza A virus
aauggugcucucugcguuu

SEQ ID NO: 8319 - RNA, 19 nt, Influenza A virus
aauggugcucucugcuuuc

SEQ ID NO: 8320 - RNA, 19 nt, Influenza A virus
aaugguacucucugcauuu

SEQ ID NO: 8321 - RNA, 19 nt, Influenza A virus
aaugguccucucugcauuu

SEQ ID NO: 8322 - RNA, 19 nt, Influenza A virus
aaugguucucucugcauuu

SEQ ID NO: 8323 - RNA, 19 nt, Influenza A virus
acccagggaaugcugagau

SEQ ID NO: 8324 - RNA, 19 nt, Influenza A virus
auccaggaaaugcugagau

SEQ ID NO: 8325 - RNA, 19 nt, Influenza A virus
acccaagaaaugcugagau

SEQ ID NO: 8326 - RNA, 19 nt, Influenza A virus
acccaggaaacgcugagau

SEQ ID NO: 8327 - RNA, 19 nt, Influenza A virus
acccaggaaauacugagau

SEQ ID NO: 8328 - RNA, 19 nt, Influenza A virus
acccaggaaaugcugaaau

SEQ ID NO: 8329 - RNA, 19 nt, Influenza A virus
acccagggaaugcugaguu

SEQ ID NO: 8330 - RNA, 19 nt, Influenza A virus
auccaggaaaugcugaaau

SEQ ID NO: 8331 - RNA, 19 nt, Influenza A virus
auccaggaaaugcugaguu

SEQ ID NO: 8332 - RNA, 19 nt, Influenza A virus
auccagggaaugcugaaau

SEQ ID NO: 8333 - RNA, 19 nt, Influenza A virus
auccugggaaugcugagau

SEQ ID NO: 8334 - RNA, 19 nt, Influenza A virus
acccaggaaacgcugaaau

SEQ ID NO: 8335 - RNA, 19 nt, Influenza A virus
acccaggaaaugcugagua

SEQ ID NO: 8336 - RNA, 19 nt, Influenza A virus
acccaggaaaugcugaaga

SEQ ID NO: 8337 - RNA, 19 nt, Influenza A virus
ucagacaugagggcagaga

SEQ ID NO: 8338 - RNA, 19 nt, Influenza A virus
ucagacaugagggcggaaa

SEQ ID NO: 8339 - RNA, 19 nt, Influenza A virus
ucagauaugagggcagaaa

SEQ ID NO: 8340 - RNA, 19 nt, Influenza A virus
ucggacaugagggcagaaa

SEQ ID NO: 8341 - RNA, 19 nt, Influenza A virus
ucagacaugagagcagaaa

SEQ ID NO: 8342 - RNA, 19 nt, Influenza A virus
ucagacaugagggcugaaa

SEQ ID NO: 8343 - RNA, 19 nt, Influenza A virus
ucugacaugagggcagaaa

SEQ ID NO: 8344 - RNA, 19 nt, Influenza A virus
ugcugagauugaagaucuc

SEQ ID NO: 8345 - RNA, 19 nt, Influenza A virus
ugcugagauugaagaucuu

SEQ ID NO: 8346 - RNA, 19 nt, Influenza A virus
cgcugagaucgaagaucuc

SEQ ID NO: 8347 - RNA, 19 nt, Influenza A virus
uacugagaucgaagaucuc

SEQ ID NO: 8348 - RNA, 19 nt, Influenza A virus
ugcugaaaucgaagaucuc

SEQ ID NO: 8349 - RNA, 19 nt, Influenza A virus
ugcugagauagaagaucuc

SEQ ID NO: 8350 - RNA, 19 nt, Influenza A virus
ugcugagaucgaagaucua

SEQ ID NO: 8351 - RNA, 19 nt, Influenza A virus
ugcugaguucgaagaucuc

SEQ ID NO: 8352 - RNA, 19 nt, Influenza A virus
cgcugagauugaagaucuc

SEQ ID NO: 8353 - RNA, 19 nt, Influenza A virus
ugcugaaauugaagaucuc

SEQ ID NO: 8354 - RNA, 19 nt, Influenza A virus
ugcugagauugaagaccuu

SEQ ID NO: 8355 - RNA, 19 nt, Influenza A virus
ugcugaguacgaagaucuc

SEQ ID NO: 8356 - RNA, 19 nt, Influenza A virus
cgcugaaauugaagaucuc

SEQ ID NO: 8357 - RNA, 19 nt, Influenza A virus
cagacaugagggcagagau

SEQ ID NO: 8358 - RNA, 19 nt, Influenza A virus
cagacaugagggcggaaau

SEQ ID NO: 8359 - RNA, 19 nt, Influenza A virus
cagauaugagggcagaaau

SEQ ID NO: 8360 - RNA, 19 nt, Influenza A virus
cggacaugagggcagaaau

SEQ ID NO: 8361 - RNA, 19 nt, Influenza A virus
cagacaugagagcagaaau

SEQ ID NO: 8362 - RNA, 19 nt, Influenza A virus
cagacaugagggcugaaau

SEQ ID NO: 8363 - RNA, 19 nt, Influenza A virus
cugacaugagggcagaaau

SEQ ID NO: 8364 - RNA, 19 nt, Influenza A virus
aacccagggaaugcugaga

SEQ ID NO: 8365 - RNA, 19 nt, Influenza A virus
aauccaggaaaugcugaga

SEQ ID NO: 8366 - RNA, 19 nt, Influenza A virus
aacccaagaaaugcugaga

SEQ ID NO: 8367 - RNA, 19 nt, Influenza A virus
aacccaggaaacgcugaga

SEQ ID NO: 8368 - RNA, 19 nt, Influenza A virus
aacccaggaaauacugaga

SEQ ID NO: 8369 - RNA, 19 nt, Influenza A virus
aacccaggaaaugcugaaa

SEQ ID NO: 8370 - RNA, 19 nt, Influenza A virus
aacccaggaaaugcugagu

SEQ ID NO: 8371 - RNA, 19 nt, Influenza A virus
aacccaggaaaugcugaag

SEQ ID NO: 8372 - RNA, 19 nt, Influenza A virus
aacccagggaaugcugagu

SEQ ID NO: 8373 - RNA, 19 nt, Influenza A virus
aauccaggaaaugcugaaa

SEQ ID NO: 8374 - RNA, 19 nt, Influenza A virus
aauccaggaaaugcugagu

SEQ ID NO: 8375 - RNA, 19 nt, Influenza A virus
aauccagggaaugcugaaa

SEQ ID NO: 8376 - RNA, 19 nt, Influenza A virus
aauccugggaaugcugaga

SEQ ID NO: 8377 - RNA, 19 nt, Influenza A virus
aacccaggaaacgcugaaa

SEQ ID NO: 8378 - RNA, 19 nt, Influenza A virus
aaaugcugagauugaagau

SEQ ID NO: 8379 - RNA, 19 nt, Influenza A virus
gaaugcugagaucgaagau

SEQ ID NO: 8380 - RNA, 19 nt, Influenza A virus
gaaugcugagauugaagau

SEQ ID NO: 8381 - RNA, 19 nt, Influenza A virus
aaacgcugagaucgaagau

SEQ ID NO: 8382 - RNA, 19 nt, Influenza A virus
aaauacugagaucgaagau

SEQ ID NO: 8383 - RNA, 19 nt, Influenza A virus
aaaugcugaaaucgaagau

SEQ ID NO: 8384 - RNA, 19 nt, Influenza A virus
aaaugcugagauagaagau

SEQ ID NO: 8385 - RNA, 19 nt, Influenza A virus
aaaugcugaguucgaagau

SEQ ID NO: 8386 - RNA, 19 nt, Influenza A virus
aaacgcugagauugaagau

SEQ ID NO: 8387 - RNA, 19 nt, Influenza A virus
aaaugcugaaauugaagau

SEQ ID NO: 8388 - RNA, 19 nt, Influenza A virus
gaaugcugaguucgaagau

SEQ ID NO: 8389 - RNA, 19 nt, Influenza A virus
gaaugcugaaauugaagau

SEQ ID NO: 8390 - RNA, 19 nt, Influenza A virus
gaaugcugagauugaagac

SEQ ID NO: 8391 - RNA, 19 nt, Influenza A virus
aaaugcugaguacgaagau

SEQ ID NO: 8392 - RNA, 19 nt, Influenza A virus
aaacgcugaaauugaagau

SEQ ID NO: 8393 - RNA, 19 nt, Influenza A virus
gaaaugcugagauugaaga

SEQ ID NO: 8394 - RNA, 19 nt, Influenza A virus
ggaaugcugagaucgaaga

SEQ ID NO: 8395 - RNA, 19 nt, Influenza A virus
ggaaugcugagauugaaga

SEQ ID NO: 8396 - RNA, 19 nt, Influenza A virus
gaaacgcugagaucgaaga

SEQ ID NO: 8397 - RNA, 19 nt, Influenza A virus
gaaauacugagaucgaaga

SEQ ID NO: 8398 - RNA, 19 nt, Influenza A virus
gaaaugcugaaaucgaaga

SEQ ID NO: 8399 - RNA, 19 nt, Influenza A virus
gaaaugcugagauagaaga

SEQ ID NO: 8400 - RNA, 19 nt, Influenza A virus
gaaaugcugaguucgaaga

SEQ ID NO: 8401 - RNA, 19 nt, Influenza A virus
gaaacgcugagauugaaga

SEQ ID NO: 8402 - RNA, 19 nt, Influenza A virus
gaaaugcugaaauugaaga

SEQ ID NO: 8403 - RNA, 19 nt, Influenza A virus
ggaaugcugaguucgaaga

SEQ ID NO: 8404 - RNA, 19 nt, Influenza A virus
ggaaugcugaaauugaaga

SEQ ID NO: 8405 - RNA, 19 nt, Influenza A virus
gaaaugcugaguacgaaga

SEQ ID NO: 8406 - RNA, 19 nt, Influenza A virus
gaaacgcugaaauugaaga

SEQ ID NO: 8407 - RNA, 19 nt, Influenza A virus
gaacccagggaaugcugag

SEQ ID NO: 8408 - RNA, 19 nt, Influenza A virus
gaauccaggaaaugcugag

SEQ ID NO: 8409 - RNA, 19 nt, Influenza A virus
aaacccaggaaaugcugag

SEQ ID NO: 8410 - RNA, 19 nt, Influenza A virus
gaacccaagaaaugcugag

SEQ ID NO: 8411 - RNA, 19 nt, Influenza A virus
gaacccaggaaacgcugag

SEQ ID NO: 8412 - RNA, 19 nt, Influenza A virus
gaacccaggaaauacugag

SEQ ID NO: 8413 - RNA, 19 nt, Influenza A virus
gaacccaggaaaugcugaa

SEQ ID NO: 8414 - RNA, 19 nt, Influenza A virus
aaacccagggaaugcugag

SEQ ID NO: 8415 - RNA, 19 nt, Influenza A virus
gaauccaggaaaugcugaa

SEQ ID NO: 8416 - RNA, 19 nt, Influenza A virus
aaacccaggaaaugcugaa

SEQ ID NO: 8417 - RNA, 19 nt, Influenza A virus
gaacccaggaaacgcugaa

SEQ ID NO: 8418 - RNA, 19 nt, Influenza A virus
ccaggaaaugcugagauug

SEQ ID NO: 8419 - RNA, 19 nt, Influenza A virus
ccagggaaugcugagaucg

SEQ ID NO: 8420 - RNA, 19 nt, Influenza A virus
ccaagaaaugcugagaucg

SEQ ID NO: 8421 - RNA, 19 nt, Influenza A virus
ccaggaaacgcugagaucg

SEQ ID NO: 8422 - RNA, 19 nt, Influenza A virus
ccaggaaauacugagaucg

SEQ ID NO: 8423 - RNA, 19 nt, Influenza A virus
ccaggaaaugcugaaaucg

SEQ ID NO: 8424 - RNA, 19 nt, Influenza A virus
ccaggaaaugcugagauag

SEQ ID NO: 8425 - RNA, 19 nt, Influenza A virus
ccaggaaaugcugaguucg

SEQ ID NO: 8426 - RNA, 19 nt, Influenza A virus
ccaggaaacgcugagauug

SEQ ID NO: 8427 - RNA, 19 nt, Influenza A virus
ccaggaaaugcugaaauug

SEQ ID NO: 8428 - RNA, 19 nt, Influenza A virus
ccagggaaugcugaguucg

SEQ ID NO: 8429 - RNA, 19 nt, Influenza A virus
ccagggaaugcugaaauug

SEQ ID NO: 8430 - RNA, 19 nt, Influenza A virus
ccugggaaugcugagauug

SEQ ID NO: 8431 - RNA, 19 nt, Influenza A virus
ccaggaaaugcugaguacg

SEQ ID NO: 8432 - RNA, 19 nt, Influenza A virus
ccaggaaacgcugaaauug

SEQ ID NO: 8433 - RNA, 19 nt, Influenza A virus
aggaaaugcugagauugaa

SEQ ID NO: 8434 - RNA, 19 nt, Influenza A virus
agggaaugcugagaucgaa

SEQ ID NO: 8435 - RNA, 19 nt, Influenza A virus
aagaaaugcugagaucgaa

SEQ ID NO: 8436 - RNA, 19 nt, Influenza A virus
aggaaacgcugagaucgaa

SEQ ID NO: 8437 - RNA, 19 nt, Influenza A virus
aggaaauacugagaucgaa

SEQ ID NO: 8438 - RNA, 19 nt, Influenza A virus
aggaaaugcugaaaucgaa

SEQ ID NO: 8439 - RNA, 19 nt, Influenza A virus
aggaaaugcugagauagaa

SEQ ID NO: 8440 - RNA, 19 nt, Influenza A virus
aggaaaugcugaguucgaa

SEQ ID NO: 8441 - RNA, 19 nt, Influenza A virus
aggaaacgcugagauugaa

SEQ ID NO: 8442 - RNA, 19 nt, Influenza A virus
aggaaaugcugaaauugaa

SEQ ID NO: 8443 - RNA, 19 nt, Influenza A virus
agggaaugcugaguucgaa

SEQ ID NO: 8444 - RNA, 19 nt, Influenza A virus
agggaaugcugaaauugaa

SEQ ID NO: 8445 - RNA, 19 nt, Influenza A virus
ugggaaugcugagauugaa

SEQ ID NO: 8446 - RNA, 19 nt, Influenza A virus
aggaaaugcugaguacgaa

SEQ ID NO: 8447 - RNA, 19 nt, Influenza A virus
aggaaacgcugaaauugaa

SEQ ID NO: 8448 - RNA, 19 nt, Influenza A virus
caggaaaugcugagauuga

SEQ ID NO: 8449 - RNA, 19 nt, Influenza A virus
cagggaaugcugagaucga

SEQ ID NO: 8450 - RNA, 19 nt, Influenza A virus
caagaaaugcugagaucga

SEQ ID NO: 8451 - RNA, 19 nt, Influenza A virus
caggaaacgcugagaucga

SEQ ID NO: 8452 - RNA, 19 nt, Influenza A virus
caggaaauacugagaucga

SEQ ID NO: 8453 - RNA, 19 nt, Influenza A virus
caggaaaugcugaaaucga

SEQ ID NO: 8454 - RNA, 19 nt, Influenza A virus
caggaaaugcugagauaga

SEQ ID NO: 8455 - RNA, 19 nt, Influenza A virus
caggaaaugcugaguucga

SEQ ID NO: 8456 - RNA, 19 nt, Influenza A virus
caggaaacgcugagauuga

SEQ ID NO: 8457 - RNA, 19 nt, Influenza A virus
caggaaaugcugaaauuga

SEQ ID NO: 8458 - RNA, 19 nt, Influenza A virus
cagggaaugcugaguucga

SEQ ID NO: 8459 - RNA, 19 nt, Influenza A virus
cagggaaugcugaaauuga

SEQ ID NO: 8460 - RNA, 19 nt, Influenza A virus
cugggaaugcugagauuga

SEQ ID NO: 8461 - RNA, 19 nt, Influenza A virus
caggaaaugcugaguacga

SEQ ID NO: 8462 - RNA, 19 nt, Influenza A virus
caggaaacgcugaaauuga

SEQ ID NO: 8463 - RNA, 19 nt, Influenza A virus
ggaaaugcugagauugaag

SEQ ID NO: 8464 - RNA, 19 nt, Influenza A virus
gggaaugcugagaucgaag

SEQ ID NO: 8465 - RNA, 19 nt, Influenza A virus
gggaaugcugagauugaag

SEQ ID NO: 8466 - RNA, 19 nt, Influenza A virus
agaaaugcugagaucgaag

SEQ ID NO: 8467 - RNA, 19 nt, Influenza A virus
ggaaacgcugagaucgaag

SEQ ID NO: 8468 - RNA, 19 nt, Influenza A virus
ggaaauacugagaucgaag

SEQ ID NO: 8469 - RNA, 19 nt, Influenza A virus
ggaaaugcugaaaucgaag

SEQ ID NO: 8470 - RNA, 19 nt, Influenza A virus
ggaaaugcugagauagaag

SEQ ID NO: 8471 - RNA, 19 nt, Influenza A virus
ggaaaugcugaguucgaag

SEQ ID NO: 8472 - RNA, 19 nt, Influenza A virus
ggaaacgcugagauugaag

SEQ ID NO: 8473 - RNA, 19 nt, Influenza A virus
ggaaaugcugaaauugaag

SEQ ID NO: 8474 - RNA, 19 nt, Influenza A virus
gggaaugcugaguucgaag

SEQ ID NO: 8475 - RNA, 19 nt, Influenza A virus
gggaaugcugaaauugaag

SEQ ID NO: 8476 - RNA, 19 nt, Influenza A virus
ggaaaugcugaguacgaag

SEQ ID NO: 8477 - RNA, 19 nt, Influenza A virus
ggaaacgcugaaauugaag

SEQ ID NO: 8478 - RNA, 19 nt, Influenza A virus
uggaucaagugagagagag

SEQ ID NO: 8479 - RNA, 19 nt, Influenza A virus
uggaucaagugagggaaag

SEQ ID NO: 8480 - RNA, 19 nt, Influenza A virus
uggaucaggugagagaaag

SEQ ID NO: 8481 - RNA, 19 nt, Influenza A virus
uagaucaagugagagaaag

SEQ ID NO: 8482 - RNA, 19 nt, Influenza A virus
uggaccaagugagagaaag

SEQ ID NO: 8483 - RNA, 19 nt, Influenza A virus
uggaucaaguaagagaaag

SEQ ID NO: 8484 - RNA, 19 nt, Influenza A virus
uggauccagugagagaaag

SEQ ID NO: 8485 - RNA, 19 nt, Influenza A virus
uggaucaagugcgagagag

SEQ ID NO: 8486 - RNA, 19 nt, Influenza A virus
uggaucaggugcgagaaag

SEQ ID NO: 8487 - RNA, 19 nt, Influenza A virus
uggaccaggugagggaaag

SEQ ID NO: 8488 - RNA, 19 nt, Influenza A virus
uggaccaagugcgagagag

SEQ ID NO: 8489 - RNA, 19 nt, Influenza A virus
uggaccaggugcgagaaag

SEQ ID NO: 8490 - RNA, 19 nt, Influenza A virus
uaugagagaaugugcaacg

SEQ ID NO: 8491 - RNA, 19 nt, Influenza A virus
uaugagagaaugugcaaua

SEQ ID NO: 8492 - RNA, 19 nt, Influenza A virus
uaugagaggaugugcaaca

SEQ ID NO: 8493 - RNA, 19 nt, Influenza A virus
uacgagagaaugugcaaca

SEQ ID NO: 8494 - RNA, 19 nt, Influenza A virus
uaugaaagaaugugcaaca

SEQ ID NO: 8495 - RNA, 19 nt, Influenza A virus
uaugauagaaugugcaaca

SEQ ID NO: 8496 - RNA, 19 nt, Influenza A virus
uacgagaggaugugcaaca

SEQ ID NO: 8497 - RNA, 19 nt, Influenza A virus
uaugaaagaaugugcaaua

SEQ ID NO: 8498 - RNA, 19 nt, Influenza A virus
uacgaaagaaugugcaaca

SEQ ID NO: 8499 - RNA, 19 nt, Influenza A virus
augagagaaugugcaacgu

SEQ ID NO: 8500 - RNA, 19 nt, Influenza A virus
augagagaaugugcaauau

SEQ ID NO: 8501 - RNA, 19 nt, Influenza A virus
augagaggaugugcaacau

SEQ ID NO: 8502 - RNA, 19 nt, Influenza A virus
acgagagaaugugcaacau

SEQ ID NO: 8503 - RNA, 19 nt, Influenza A virus
augaaagaaugugcaacau

SEQ ID NO: 8504 - RNA, 19 nt, Influenza A virus
augauagaaugugcaacau

SEQ ID NO: 8505 - RNA, 19 nt, Influenza A virus
acgagaggaugugcaacau

SEQ ID NO: 8506 - RNA, 19 nt, Influenza A virus
augaaagaaugugcaauau

SEQ ID NO: 8507 - RNA, 19 nt, Influenza A virus
acgaaagaaugugcaacau

SEQ ID NO: 8508 - RNA, 19 nt, Influenza A virus
gaaaauuucaaacggcugc

SEQ ID NO: 8509 - RNA, 19 nt, Influenza A virus
gaaaauuucagacagcugc

SEQ ID NO: 8510 - RNA, 19 nt, Influenza A virus
ggaaauuucaaacagcugc

SEQ ID NO: 8511 - RNA, 19 nt, Influenza A virus
gaaaguuucagacagcugc

SEQ ID NO: 8512 - RNA, 19 nt, Influenza A virus
ggaaauuucaagcagcugc

SEQ ID NO: 8513 - RNA, 19 nt, Influenza A virus
ggaaauuucagacagcugc

SEQ ID NO: 8514 - RNA, 19 nt, Influenza A virus
gaaaacuucaaacagcugc

SEQ ID NO: 8515 - RNA, 19 nt, Influenza A virus
gaaaauuccaaacagcugc

SEQ ID NO: 8516 - RNA, 19 nt, Influenza A virus
gaaaauuucaaacugcugc

SEQ ID NO: 8517 - RNA, 19 nt, Influenza A virus
guaaauuucaaacagcugc

SEQ ID NO: 8518 - RNA, 19 nt, Influenza A virus
ggaaauuucaaacagcagc

SEQ ID NO: 8519 - RNA, 19 nt, Influenza A virus
ggaaauuucaaacugcugc

SEQ ID NO: 8520 - RNA, 19 nt, Influenza A virus
ggaaauuucaaacggcagc

SEQ ID NO: 8521 - RNA, 19 nt, Influenza A virus
ggaaauuccaaacagcagc

SEQ ID NO: 8522 - RNA, 19 nt, Influenza A virus
ggaaaauuucaaacggcug

SEQ ID NO: 8523 - RNA, 19 nt, Influenza A virus
ggaaaauuucagacagcug

SEQ ID NO: 8524 - RNA, 19 nt, Influenza A virus
gggaaauuucaaacagcug

SEQ ID NO: 8525 - RNA, 19 nt, Influenza A virus
ggaaaguuucagacagcug

SEQ ID NO: 8526 - RNA, 19 nt, Influenza A virus
gggaaauuucaagcagcug

SEQ ID NO: 8527 - RNA, 19 nt, Influenza A virus
gggaaauuucagacagcug

SEQ ID NO: 8528 - RNA, 19 nt, Influenza A virus
ggaaaacuucaaacagcug

SEQ ID NO: 8529 - RNA, 19 nt, Influenza A virus
ggaaaauuccaaacagcug

SEQ ID NO: 8530 - RNA, 19 nt, Influenza A virus
ggaaaauuucaaacugcug

SEQ ID NO: 8531 - RNA, 19 nt, Influenza A virus
gguaaauuucaaacagcug

SEQ ID NO: 8532 - RNA, 19 nt, Influenza A virus
gggaaauuucaaacagcag

SEQ ID NO: 8533 - RNA, 19 nt, Influenza A virus
gggaaauuucaaacugcug

SEQ ID NO: 8534 - RNA, 19 nt, Influenza A virus
gggaaauuucaaacggcag

SEQ ID NO: 8535 - RNA, 19 nt, Influenza A virus
gggaaauuccaaacagcag

SEQ ID NO: 8536 - RNA, 19 nt, Influenza A virus
aaaggaaaauuucaaacgg

SEQ ID NO: 8537 - RNA, 19 nt, Influenza A virus
aaaggaaaauuucagacag

SEQ ID NO: 8538 - RNA, 19 nt, Influenza A virus
aaagggaaauuucaaacag

SEQ ID NO: 8539 - RNA, 19 nt, Influenza A virus
aagggaaaauuucaaacag

SEQ ID NO: 8540 - RNA, 19 nt, Influenza A virus
aaaggaaaguuucagacag

SEQ ID NO: 8541 - RNA, 19 nt, Influenza A virus
aaagggaaauuucaaacgg

SEQ ID NO: 8542 - RNA, 19 nt, Influenza A virus
aaagggaaauuucaagcag

SEQ ID NO: 8543 - RNA, 19 nt, Influenza A virus
aaagggaaauuucagacag

SEQ ID NO: 8544 - RNA, 19 nt, Influenza A virus
aaaggaaaacuucaaacag

SEQ ID NO: 8545 - RNA, 19 nt, Influenza A virus
aaaggaaaauuccaaacag

SEQ ID NO: 8546 - RNA, 19 nt, Influenza A virus
aaaggaaaauuucaaacug

SEQ ID NO: 8547 - RNA, 19 nt, Influenza A virus
aaagguaaauuucaaacag

SEQ ID NO: 8548 - RNA, 19 nt, Influenza A virus
aaagggaaauuccaaacag

SEQ ID NO: 8549 - RNA, 19 nt, Influenza A virus
aaagggaaauuucaaacug

SEQ ID NO: 8550 - RNA, 19 nt, Influenza A virus
aaagggaaauuucagaccg

SEQ ID NO: 8551 - RNA, 19 nt, Influenza A virus
aggaaaauuucaaacggcu

SEQ ID NO: 8552 - RNA, 19 nt, Influenza A virus
aggaaaauuucagacagcu

SEQ ID NO: 8553 - RNA, 19 nt, Influenza A virus
agggaaauuucaaacagcu

SEQ ID NO: 8554 - RNA, 19 nt, Influenza A virus
gggaaaauuucaaacagcu

SEQ ID NO: 8555 - RNA, 19 nt, Influenza A virus
aggaaaguuucagacagcu

SEQ ID NO: 8556 - RNA, 19 nt, Influenza A virus
agggaaauuucaagcagcu

SEQ ID NO: 8557 - RNA, 19 nt, Influenza A virus
agggaaauuucagacagcu

SEQ ID NO: 8558 - RNA, 19 nt, Influenza A virus
aggaaaacuucaaacagcu

SEQ ID NO: 8559 - RNA, 19 nt, Influenza A virus
aggaaaauuccaaacagcu

SEQ ID NO: 8560 - RNA, 19 nt, Influenza A virus
aggaaaauuucaaacugcu

SEQ ID NO: 8561 - RNA, 19 nt, Influenza A virus
agguaaauuucaaacagcu

SEQ ID NO: 8562 - RNA, 19 nt, Influenza A virus
agggaaauuucaaacagca

SEQ ID NO: 8563 - RNA, 19 nt, Influenza A virus
agggaaauuucaaacugcu

SEQ ID NO: 8564 - RNA, 19 nt, Influenza A virus
agggaaauuucaaacggca

SEQ ID NO: 8565 - RNA, 19 nt, Influenza A virus
agggaaauuccaaacagca

SEQ ID NO: 8566 - RNA, 19 nt, Influenza A virus
aaggaaaauuucaaacggc

SEQ ID NO: 8567 - RNA, 19 nt, Influenza A virus
aaggaaaauuucagacagc

SEQ ID NO: 8568 - RNA, 19 nt, Influenza A virus
aagggaaauuucaaacagc

SEQ ID NO: 8569 - RNA, 19 nt, Influenza A virus
agggaaaauuucaaacagc

SEQ ID NO: 8570 - RNA, 19 nt, Influenza A virus
aaggaaaguuucagacagc

SEQ ID NO: 8571 - RNA, 19 nt, Influenza A virus
aagggaaauuucaaacggc

SEQ ID NO: 8572 - RNA, 19 nt, Influenza A virus
aagggaaauuucaagcagc

SEQ ID NO: 8573 - RNA, 19 nt, Influenza A virus
aagggaaauuucagacagc

SEQ ID NO: 8574 - RNA, 19 nt, Influenza A virus
aaggaaaacuucaaacagc

SEQ ID NO: 8575 - RNA, 19 nt, Influenza A virus
aaggaaaauuccaaacagc

SEQ ID NO: 8576 - RNA, 19 nt, Influenza A virus
aaggaaaauuucaaacugc

SEQ ID NO: 8577 - RNA, 19 nt, Influenza A virus
aagguaaauuucaaacagc

SEQ ID NO: 8578 - RNA, 19 nt, Influenza A virus
aagggaaauuccaaacagc

SEQ ID NO: 8579 - RNA, 19 nt, Influenza A virus
aagggaaauuucaaacugc

SEQ ID NO: 8580 - RNA, 19 nt, Influenza A virus
aagggaaauuucagaccgc

SEQ ID NO: 8581 - RNA, 19 nt, Influenza A virus
cccaggaaaugcugagauu

SEQ ID NO: 8582 - RNA, 19 nt, Influenza A virus
cccagggaaugcugagauc

SEQ ID NO: 8583 - RNA, 19 nt, Influenza A virus
uccaggaaaugcugagauc

SEQ ID NO: 8584 - RNA, 19 nt, Influenza A virus
cccaagaaaugcugagauc

SEQ ID NO: 8585 - RNA, 19 nt, Influenza A virus
cccaggaaacgcugagauc

SEQ ID NO: 8586 - RNA, 19 nt, Influenza A virus
cccaggaaauacugagauc

SEQ ID NO: 8587 - RNA, 19 nt, Influenza A virus
cccaggaaaugcugaaauc

SEQ ID NO: 8588 - RNA, 19 nt, Influenza A virus
cccaggaaaugcugagaua

SEQ ID NO: 8589 - RNA, 19 nt, Influenza A virus
cccaggaaacgcugagauu

SEQ ID NO: 8590 - RNA, 19 nt, Influenza A virus
cccaggaaaugcugaaauu

SEQ ID NO: 8591 - RNA, 19 nt, Influenza A virus
cccagggaaugcugaguuc

SEQ ID NO: 8592 - RNA, 19 nt, Influenza A virus
uccaggaaaugcugaguuc

SEQ ID NO: 8593 - RNA, 19 nt, Influenza A virus
uccaggaaaugcugaaauu

SEQ ID NO: 8594 - RNA, 19 nt, Influenza A virus
cccaggaaaugcugaguac

SEQ ID NO: 8595 - RNA, 19 nt, Influenza A virus
cccaggaaacgcugaaauu

SEQ ID NO: 8596 - RNA, 19 nt, Influenza A virus
uucacgcucaccgugccua

SEQ ID NO: 8597 - RNA, 19 nt, Influenza A virus
uucacgcucacugugccca

SEQ ID NO: 8598 - RNA, 19 nt, Influenza A virus
uucacacucaccgugccca

SEQ ID NO: 8599 - RNA, 19 nt, Influenza A virus
uucacgcucaccgugccaa

SEQ ID NO: 8600 - RNA, 19 nt, Influenza A virus
cgggcccccucaaagccga

SEQ ID NO: 8601 - RNA, 19 nt, Influenza A virus
uaggcccccucaaagccga

SEQ ID NO: 8602 - RNA, 19 nt, Influenza A virus
caggcccccucaaagccca

SEQ ID NO: 8603 - RNA, 19 nt, Influenza A virus
ccggcccccucaaagccga

SEQ ID NO: 8604 - RNA, 19 nt, Influenza A virus
ucgggcccccucaaagccg

SEQ ID NO: 8605 - RNA, 19 nt, Influenza A virus
uuaggcccccucaaagccg

SEQ ID NO: 8606 - RNA, 19 nt, Influenza A virus
ucaggcccccucaaagccc

SEQ ID NO: 8607 - RNA, 19 nt, Influenza A virus
uccggcccccucaaagccg

SEQ ID NO: 8608 - RNA, 19 nt, Influenza A virus
ucacgcucaccgugccuag

SEQ ID NO: 8609 - RNA, 19 nt, Influenza A virus
ucacgcucacugugcccag

SEQ ID NO: 8610 - RNA, 19 nt, Influenza A virus
ucacacucaccgugcccag

SEQ ID NO: 8611 - RNA, 19 nt, Influenza A virus
ucacgcucaccgugccaag

SEQ ID NO: 8612 - RNA, 19 nt, Influenza A virus
ucacgcucaccgugcccac

SEQ ID NO: 8613 - RNA, 19 nt, Influenza A virus
cacgcucaccgugccuagu

SEQ ID NO: 8614 - RNA, 19 nt, Influenza A virus
cacgcucacugugcccagu

SEQ ID NO: 8615 - RNA, 19 nt, Influenza A virus
cacacucaccgugcccagu

SEQ ID NO: 8616 - RNA, 19 nt, Influenza A virus
cacgcucaccgugccaagu

SEQ ID NO: 8617 - RNA, 19 nt, Influenza A virus
cacgcucaccgugcccacu

SEQ ID NO: 8618 - RNA, 19 nt, Influenza A virus
cacgcucaccgugcccagc

SEQ ID NO: 8619 - RNA, 19 nt, Influenza A virus
cgcucaccgugccuaguga

SEQ ID NO: 8620 - RNA, 19 nt, Influenza A virus
cgcucacugugcccaguga

SEQ ID NO: 8621 - RNA, 19 nt, Influenza A virus
cacucaccgugcccaguga

SEQ ID NO: 8622 - RNA, 19 nt, Influenza A virus
cgcucaccgugccaaguga

SEQ ID NO: 8623 - RNA, 19 nt, Influenza A virus
cgcucaccgugcccacuga

SEQ ID NO: 8624 - RNA, 19 nt, Influenza A virus
cgcucaccgugcccagcga

SEQ ID NO: 8625 - RNA, 19 nt, Influenza A virus
cgcucaccgugcccaguaa

SEQ ID NO: 8626 - RNA, 19 nt, Influenza A virus
acgcucaccgugccuagug

SEQ ID NO: 8627 - RNA, 19 nt, Influenza A virus
acgcucacugugcccagug

SEQ ID NO: 8628 - RNA, 19 nt, Influenza A virus
acacucaccgugcccagug

SEQ ID NO: 8629 - RNA, 19 nt, Influenza A virus
acgcucaccgugccaagug

SEQ ID NO: 8630 - RNA, 19 nt, Influenza A virus
acgcucaccgugcccacug

SEQ ID NO: 8631 - RNA, 19 nt, Influenza A virus
acgcucaccgugcccagcg

SEQ ID NO: 8632 - RNA, 19 nt, Influenza A virus
acgcucaccgugcccagua

SEQ ID NO: 8633 - RNA, 19 nt, Influenza A virus
ucaccgugccuagugagcg

SEQ ID NO: 8634 - RNA, 19 nt, Influenza A virus
ucacugugcccagugagcg

SEQ ID NO: 8635 - RNA, 19 nt, Influenza A virus
ucaccgugccaagugagcg

SEQ ID NO: 8636 - RNA, 19 nt, Influenza A virus
ucaccgugcccacugagcg

SEQ ID NO: 8637 - RNA, 19 nt, Influenza A virus
ucaccgugcccagcgagcg

SEQ ID NO: 8638 - RNA, 19 nt, Influenza A virus
ucaccgugcccaguaagcg

SEQ ID NO: 8639 - RNA, 19 nt, Influenza A virus
ucaccgugcccagugaacg

SEQ ID NO: 8640 - RNA, 19 nt, Influenza A virus
cucaccgugccuagugagc

SEQ ID NO: 8641 - RNA, 19 nt, Influenza A virus
cucacugugcccagugagc

SEQ ID NO: 8642 - RNA, 19 nt, Influenza A virus
cucaccgugccaagugagc

SEQ ID NO: 8643 - RNA, 19 nt, Influenza A virus
cucaccgugcccacugagc

SEQ ID NO: 8644 - RNA, 19 nt, Influenza A virus
cucaccgugcccagcgagc

SEQ ID NO: 8645 - RNA, 19 nt, Influenza A virus
cucaccgugcccaguaagc

SEQ ID NO: 8646 - RNA, 19 nt, Influenza A virus
cucaccgugcccagugaac

SEQ ID NO: 8647 - RNA, 19 nt, Influenza A virus
gcucaccgugccuagugag

SEQ ID NO: 8648 - RNA, 19 nt, Influenza A virus
gcucacugugcccagugag

SEQ ID NO: 8649 - RNA, 19 nt, Influenza A virus
acucaccgugcccagugag

SEQ ID NO: 8650 - RNA, 19 nt, Influenza A virus
gcucaccgugccaagugag

SEQ ID NO: 8651 - RNA, 19 nt, Influenza A virus
gcucaccgugcccacugag

SEQ ID NO: 8652 - RNA, 19 nt, Influenza A virus
gcucaccgugcccagcgag

SEQ ID NO: 8653 - RNA, 19 nt, Influenza A virus
gcucaccgugcccaguaag

SEQ ID NO: 8654 - RNA, 19 nt, Influenza A virus
gcucaccgugcccagugaa

SEQ ID NO: 8655 - RNA, 19 nt, Influenza A virus
aucuugagguucucaugga

SEQ ID NO: 8656 - RNA, 19 nt, Influenza A virus
accuugaggcucucaugga

SEQ ID NO: 8657 - RNA, 19 nt, Influenza A virus
aucuagaggcucucaugga

SEQ ID NO: 8658 - RNA, 19 nt, Influenza A virus
aucucgaggcucucaugga

SEQ ID NO: 8659 - RNA, 19 nt, Influenza A virus
aucuugaagcucucaugga

SEQ ID NO: 8660 - RNA, 19 nt, Influenza A virus
aucuugaggcacucaugga

SEQ ID NO: 8661 - RNA, 19 nt, Influenza A virus
aucuugaggcucuaaugga

SEQ ID NO: 8662 - RNA, 19 nt, Influenza A virus
aucuugaggcucucacgga

SEQ ID NO: 8663 - RNA, 19 nt, Influenza A virus
aucuugagguucucacgga

SEQ ID NO: 8664 - RNA, 19 nt, Influenza A virus
gaucuugagguucucaugg

SEQ ID NO: 8665 - RNA, 19 nt, Influenza A virus
gaccuugaggcucucaugg

SEQ ID NO: 8666 - RNA, 19 nt, Influenza A virus
gaucuagaggcucucaugg

SEQ ID NO: 8667 - RNA, 19 nt, Influenza A virus
gaucucgaggcucucaugg

SEQ ID NO: 8668 - RNA, 19 nt, Influenza A virus
gaucuugaagcucucaugg

SEQ ID NO: 8669 - RNA, 19 nt, Influenza A virus
gaucuugaggcacucaugg

SEQ ID NO: 8670 - RNA, 19 nt, Influenza A virus
gaucuugaggcucuaaugg

SEQ ID NO: 8671 - RNA, 19 nt, Influenza A virus
gaucuugaggcucucacgg

SEQ ID NO: 8672 - RNA, 19 nt, Influenza A virus
gaucuugagguucucacgg

SEQ ID NO: 8673 - RNA, 19 nt, Influenza A virus
ugucaccucugacuagggg

SEQ ID NO: 8674 - RNA, 19 nt, Influenza A virus
ugucaccucuaacuaaggg

SEQ ID NO: 8675 - RNA, 19 nt, Influenza A virus
ugucaccucugacaaaggg

SEQ ID NO: 8676 - RNA, 19 nt, Influenza A virus
ugucaccucugaccaaggg

SEQ ID NO: 8677 - RNA, 19 nt, Influenza A virus
ugucaccucugacuaaagg

SEQ ID NO: 8678 - RNA, 19 nt, Influenza A virus
ugucaccucuuacuaaggg

SEQ ID NO: 8679 - RNA, 19 nt, Influenza A virus
cugucaccucugacuaggg

SEQ ID NO: 8680 - RNA, 19 nt, Influenza A virus
cugucaccucuaacuaagg

SEQ ID NO: 8681 - RNA, 19 nt, Influenza A virus
cugucaccucugacaaagg

SEQ ID NO: 8682 - RNA, 19 nt, Influenza A virus
cugucaccucugaccaagg

SEQ ID NO: 8683 - RNA, 19 nt, Influenza A virus
cugucaccucugacuaaag

SEQ ID NO: 8684 - RNA, 19 nt, Influenza A virus
cugucaccucuuacuaagg

SEQ ID NO: 8685 - RNA, 19 nt, Influenza A virus
uugucaccucugacuaaag

SEQ ID NO: 8686 - RNA, 19 nt, Influenza A virus
gacugcagcguagacguuu

SEQ ID NO: 8687 - RNA, 19 nt, Influenza A virus
gacugcaacguagacgcuu

SEQ ID NO: 8688 - RNA, 19 nt, Influenza A virus
gacugcagcguaaacgcuu

SEQ ID NO: 8689 - RNA, 19 nt, Influenza A virus
gacugcagcguacacgcuu

SEQ ID NO: 8690 - RNA, 19 nt, Influenza A virus
gacugcagcguagacgauu

SEQ ID NO: 8691 - RNA, 19 nt, Influenza A virus
gacugcagcguagacgguu

SEQ ID NO: 8692 - RNA, 19 nt, Influenza A virus
gacugcagcguauacgcuu

SEQ ID NO: 8693 - RNA, 19 nt, Influenza A virus
gacugcaacguauacgcuu

SEQ ID NO: 8694 - RNA, 19 nt, Influenza A virus
gacugcagcguauacgauu

SEQ ID NO: 8695 - RNA, 19 nt, Influenza A virus
ggacugcagcguagacguu

SEQ ID NO: 8696 - RNA, 19 nt, Influenza A virus
ggacugcaacguagacgcu

SEQ ID NO: 8697 - RNA, 19 nt, Influenza A virus
ggacugcagcguaaacgcu

SEQ ID NO: 8698 - RNA, 19 nt, Influenza A virus
ggacugcagcguacacgcu

SEQ ID NO: 8699 - RNA, 19 nt, Influenza A virus
ggacugcagcguagacgau

SEQ ID NO: 8700 - RNA, 19 nt, Influenza A virus
ggacugcagcguagacggu

SEQ ID NO: 8701 - RNA, 19 nt, Influenza A virus
ggacugcagcguauacgcu

SEQ ID NO: 8702 - RNA, 19 nt, Influenza A virus
ggacugcaacguauacgcu

SEQ ID NO: 8703 - RNA, 19 nt, Influenza A virus
ggacugcagcguauacgau

SEQ ID NO: 8704 - RNA, 19 nt, Influenza A virus
ugcagcguagacguuuugu

SEQ ID NO: 8705 - RNA, 19 nt, Influenza A virus
ugcaacguagacgcuuugu

SEQ ID NO: 8706 - RNA, 19 nt, Influenza A virus
ugcagcguaaacgcuuugu

SEQ ID NO: 8707 - RNA, 19 nt, Influenza A virus
ugcagcguacacgcuuugu

SEQ ID NO: 8708 - RNA, 19 nt, Influenza A virus
ugcagcguagacgauuugu

SEQ ID NO: 8709 - RNA, 19 nt, Influenza A virus
ugcagcguagacgcuucgu

SEQ ID NO: 8710 - RNA, 19 nt, Influenza A virus
ugcagcguagacgguuugu

SEQ ID NO: 8711 - RNA, 19 nt, Influenza A virus
ugcagcguauacgcuuugu

SEQ ID NO: 8712 - RNA, 19 nt, Influenza A virus
ugcaacguauacgcuuugu

SEQ ID NO: 8713 - RNA, 19 nt, Influenza A virus
ugcagcguauacgauuugu

SEQ ID NO: 8714 - RNA, 19 nt, Influenza A virus
acugcagcguagacguuuu

SEQ ID NO: 8715 - RNA, 19 nt, Influenza A virus
acugcaacguagacgcuuu

SEQ ID NO: 8716 - RNA, 19 nt, Influenza A virus
acugcagcguaaacgcuuu

SEQ ID NO: 8717 - RNA, 19 nt, Influenza A virus
acugcagcguacacgcuuu

SEQ ID NO: 8718 - RNA, 19 nt, Influenza A virus
acugcagcguagacgauuu

SEQ ID NO: 8719 - RNA, 19 nt, Influenza A virus
acugcagcguagacgcuuc

SEQ ID NO: 8720 - RNA, 19 nt, Influenza A virus
acugcagcguagacgguuu

SEQ ID NO: 8721 - RNA, 19 nt, Influenza A virus
acugcagcguauacgcuuu

SEQ ID NO: 8722 - RNA, 19 nt, Influenza A virus
acugcaacguauacgcuuu

SEQ ID NO: 8723 - RNA, 19 nt, Influenza A virus
acugcagcguauacgauuu

SEQ ID NO: 8724 - RNA, 19 nt, Influenza A virus
cugcagcguagacguuuug

SEQ ID NO: 8725 - RNA, 19 nt, Influenza A virus
cugcaacguagacgcuuug

SEQ ID NO: 8726 - RNA, 19 nt, Influenza A virus
cugcagcguaaacgcuuug

SEQ ID NO: 8727 - RNA, 19 nt, Influenza A virus
cugcagcguacacgcuuug

SEQ ID NO: 8728 - RNA, 19 nt, Influenza A virus
cugcagcguagacgauuug

SEQ ID NO: 8729 - RNA, 19 nt, Influenza A virus
cugcagcguagacgcuucg

SEQ ID NO: 8730 - RNA, 19 nt, Influenza A virus
cugcagcguagacgguuug

SEQ ID NO: 8731 - RNA, 19 nt, Influenza A virus
cugcagcguauacgcuuug

SEQ ID NO: 8732 - RNA, 19 nt, Influenza A virus
cugcaacguauacgcuuug

SEQ ID NO: 8733 - RNA, 19 nt, Influenza A virus
cugcagcguauacgauuug

SEQ ID NO: 8734 - RNA, 19 nt, Influenza A virus
gccauggagcaaauggcug

SEQ ID NO: 8735 - RNA, 19 nt, Influenza A virus
gcuauggaacaaauggcug

SEQ ID NO: 8736 - RNA, 19 nt, Influenza A virus
gcuauggagcacauggcug

SEQ ID NO: 8737 - RNA, 19 nt, Influenza A virus
gccauggagcagauggcug

SEQ ID NO: 8738 - RNA, 19 nt, Influenza A virus
gcuauggagcagauggcag

SEQ ID NO: 8739 - RNA, 19 nt, Influenza A virus
gcuauggagcagauggcgg

SEQ ID NO: 8740 - RNA, 19 nt, Influenza A virus
gcuauggaacagaugguug

SEQ ID NO: 8741 - RNA, 19 nt, Influenza A virus
gccauggaacaaauggcug

SEQ ID NO: 8742 - RNA, 19 nt, Influenza A virus
gccauggagcagauggcag

SEQ ID NO: 8743 - RNA, 19 nt, Influenza A virus
uggcuaaagacaagaccga

SEQ ID NO: 8744 - RNA, 19 nt, Influenza A virus
uggcuaaagacaaggccaa

SEQ ID NO: 8745 - RNA, 19 nt, Influenza A virus
uggcugaagacaagaccaa

SEQ ID NO: 8746 - RNA, 19 nt, Influenza A virus
ugguuaaagacaagaccga

SEQ ID NO: 8747 - RNA, 19 nt, Influenza A virus
uggcuaaagacaaaaccaa

SEQ ID NO: 8748 - RNA, 19 nt, Influenza A virus
uggcuaaagacaagaccca

SEQ ID NO: 8749 - RNA, 19 nt, Influenza A virus
uggcuaaagacaagaccua

SEQ ID NO: 8750 - RNA, 19 nt, Influenza A virus
uggcuaaagacuagaccua

SEQ ID NO: 8751 - RNA, 19 nt, Influenza A virus
cagcguagacgcuuuguuc

SEQ ID NO: 8752 - RNA, 19 nt, Influenza A virus
cagcguagacguuuugucc

SEQ ID NO: 8753 - RNA, 19 nt, Influenza A virus
caacguagacgcuuugucc

SEQ ID NO: 8754 - RNA, 19 nt, Influenza A virus
cagcguaaacgcuuugucc

SEQ ID NO: 8755 - RNA, 19 nt, Influenza A virus
cagcguacacgcuuugucc

SEQ ID NO: 8756 - RNA, 19 nt, Influenza A virus
cagcguagacgauuugucc

SEQ ID NO: 8757 - RNA, 19 nt, Influenza A virus
cagcguagacgcuucgucc

SEQ ID NO: 8758 - RNA, 19 nt, Influenza A virus
cagcguagacgguuugucc

SEQ ID NO: 8759 - RNA, 19 nt, Influenza A virus
cagcguauacgcuuugucc

SEQ ID NO: 8760 - RNA, 19 nt, Influenza A virus
caacguagacgcuuuguuc

SEQ ID NO: 8761 - RNA, 19 nt, Influenza A virus
caacguauacgcuuugucc

SEQ ID NO: 8762 - RNA, 19 nt, Influenza A virus
cagcguauacgauuugucc

SEQ ID NO: 8763 - RNA, 19 nt, Influenza A virus
ccauggagcaaauggcugg

SEQ ID NO: 8764 - RNA, 19 nt, Influenza A virus
cuauggaacaaauggcugg

SEQ ID NO: 8765 - RNA, 19 nt, Influenza A virus
cuauggagcacauggcugg

SEQ ID NO: 8766 - RNA, 19 nt, Influenza A virus
ccauggagcagauggcugg

SEQ ID NO: 8767 - RNA, 19 nt, Influenza A virus
cuauggagcagauggcagg

SEQ ID NO: 8768 - RNA, 19 nt, Influenza A virus
cuauggagcagauggcggg

SEQ ID NO: 8769 - RNA, 19 nt, Influenza A virus
cuauggaacagaugguugg

SEQ ID NO: 8770 - RNA, 19 nt, Influenza A virus
ccauggaacaaauggcugg

SEQ ID NO: 8771 - RNA, 19 nt, Influenza A virus
ccauggagcagauggcagg

SEQ ID NO: 8772 - RNA, 19 nt, Influenza A virus
agcguagacgcuuuguuca

SEQ ID NO: 8773 - RNA, 19 nt, Influenza A virus
agcguagacguuuugucca

SEQ ID NO: 8774 - RNA, 19 nt, Influenza A virus
aacguagacgcuuugucca

SEQ ID NO: 8775 - RNA, 19 nt, Influenza A virus
agcguaaacgcuuugucca

SEQ ID NO: 8776 - RNA, 19 nt, Influenza A virus
agcguacacgcuuugucca

SEQ ID NO: 8777 - RNA, 19 nt, Influenza A virus
agcguagacgauuugucca

SEQ ID NO: 8778 - RNA, 19 nt, Influenza A virus
agcguagacgcuucgucca

SEQ ID NO: 8779 - RNA, 19 nt, Influenza A virus
agcguagacgguuugucca

SEQ ID NO: 8780 - RNA, 19 nt, Influenza A virus
agcguauacgcuuugucca

SEQ ID NO: 8781 - RNA, 19 nt, Influenza A virus
aacguagacgcuuuguuca

SEQ ID NO: 8782 - RNA, 19 nt, Influenza A virus
aacguauacgcuuugucca

SEQ ID NO: 8783 - RNA, 19 nt, Influenza A virus
agcguauacgauuugucca

SEQ ID NO: 8784 - RNA, 19 nt, Influenza A virus
gcagcguagacgcuuuguu

SEQ ID NO: 8785 - RNA, 19 nt, Influenza A virus
gcagcguagacguuuuguc

SEQ ID NO: 8786 - RNA, 19 nt, Influenza A virus
gcaacguagacgcuuuguc

SEQ ID NO: 8787 - RNA, 19 nt, Influenza A virus
gcagcguaaacgcuuuguc

SEQ ID NO: 8788 - RNA, 19 nt, Influenza A virus
gcagcguacacgcuuuguc

SEQ ID NO: 8789 - RNA, 19 nt, Influenza A virus
gcagcguagacgauuuguc

SEQ ID NO: 8790 - RNA, 19 nt, Influenza A virus
gcagcguagacgcuucguc

SEQ ID NO: 8791 - RNA, 19 nt, Influenza A virus
gcagcguagacgguuuguc

SEQ ID NO: 8792 - RNA, 19 nt, Influenza A virus
gcagcguauacgcuuuguc

SEQ ID NO: 8793 - RNA, 19 nt, Influenza A virus
gcaacguagacgcuuuguu

SEQ ID NO: 8794 - RNA, 19 nt, Influenza A virus
gcaacguauacgcuuuguc

SEQ ID NO: 8795 - RNA, 19 nt, Influenza A virus
gcagcguauacgauuuguc

SEQ ID NO: 8796 - RNA, 19 nt, Influenza A virus
ggcuaaagacaagaccgau

SEQ ID NO: 8797 - RNA, 19 nt, Influenza A virus
ggcuaaagacaaggccaau

SEQ ID NO: 8798 - RNA, 19 nt, Influenza A virus
ggcugaagacaagaccaau

SEQ ID NO: 8799 - RNA, 19 nt, Influenza A virus
gguuaaagacaagaccgau

SEQ ID NO: 8800 - RNA, 19 nt, Influenza A virus
ggcuaaagacaaaaccaau

SEQ ID NO: 8801 - RNA, 19 nt, Influenza A virus
ggcuaaagacaagacccau

SEQ ID NO: 8802 - RNA, 19 nt, Influenza A virus
ggcuaaagacaagaccuau

SEQ ID NO: 8803 - RNA, 19 nt, Influenza A virus
ggcuaaagacuagaccuau

SEQ ID NO: 8804 - RNA, 19 nt, Influenza A virus
cguagacgcuuuguccaga

SEQ ID NO: 8805 - RNA, 19 nt, Influenza A virus
cguagacgcuuuguucaaa

SEQ ID NO: 8806 - RNA, 19 nt, Influenza A virus
cguagacguuuuguccaaa

SEQ ID NO: 8807 - RNA, 19 nt, Influenza A virus
cguacacgcuuuguccaaa

SEQ ID NO: 8808 - RNA, 19 nt, Influenza A virus
cguagacgauuuguccaaa

SEQ ID NO: 8809 - RNA, 19 nt, Influenza A virus
cguagacgcuucguccaaa

SEQ ID NO: 8810 - RNA, 19 nt, Influenza A virus
cguagacgguuuguccaaa

SEQ ID NO: 8811 - RNA, 19 nt, Influenza A virus
cguauacgcuuuguccaaa

SEQ ID NO: 8812 - RNA, 19 nt, Influenza A virus
cguaaacgcuuuguccaga

SEQ ID NO: 8813 - RNA, 19 nt, Influenza A virus
cguacacucuuuguccaaa

SEQ ID NO: 8814 - RNA, 19 nt, Influenza A virus
cguauacgauuuguccaaa

SEQ ID NO: 8815 - RNA, 19 nt, Influenza A virus
guagacgcuuuguccagaa

SEQ ID NO: 8816 - RNA, 19 nt, Influenza A virus
guagacgcuuuguucaaaa

SEQ ID NO: 8817 - RNA, 19 nt, Influenza A virus
guagacguuuuguccaaaa

SEQ ID NO: 8818 - RNA, 19 nt, Influenza A virus
guacacgcuuuguccaaaa

SEQ ID NO: 8819 - RNA, 19 nt, Influenza A virus
guagacgauuuguccaaaa

SEQ ID NO: 8820 - RNA, 19 nt, Influenza A virus
guagacgcuucguccaaaa

SEQ ID NO: 8821 - RNA, 19 nt, Influenza A virus
guagacgguuuguccaaaa

SEQ ID NO: 8822 - RNA, 19 nt, Influenza A virus
guauacgcuuuguccaaaa

SEQ ID NO: 8823 - RNA, 19 nt, Influenza A virus
guaaacgcuuuguccagaa

SEQ ID NO: 8824 - RNA, 19 nt, Influenza A virus
guacacucuuuguccaaaa

SEQ ID NO: 8825 - RNA, 19 nt, Influenza A virus
guauacgauuuguccaaaa

SEQ ID NO: 8826 - RNA, 19 nt, Influenza A virus
agacgcuuuguccagaaug

SEQ ID NO: 8827 - RNA, 19 nt, Influenza A virus
agacgcuuuguucaaaaug

SEQ ID NO: 8828 - RNA, 19 nt, Influenza A virus
agacguuuuguccaaaaug

SEQ ID NO: 8829 - RNA, 19 nt, Influenza A virus
acacgcuuuguccaaaaug

SEQ ID NO: 8830 - RNA, 19 nt, Influenza A virus
agacgauuuguccaaaaug

SEQ ID NO: 8831 - RNA, 19 nt, Influenza A virus
agacgcuucguccaaaaug

SEQ ID NO: 8832 - RNA, 19 nt, Influenza A virus
agacgcuuuguccaaaacg

SEQ ID NO: 8833 - RNA, 19 nt, Influenza A virus
agacgguuuguccaaaaug

SEQ ID NO: 8834 - RNA, 19 nt, Influenza A virus
auacgcuuuguccaaaaug

SEQ ID NO: 8835 - RNA, 19 nt, Influenza A virus
aaacgcuuuguccagaaug

SEQ ID NO: 8836 - RNA, 19 nt, Influenza A virus
agacgcuuuguccagaacg

SEQ ID NO: 8837 - RNA, 19 nt, Influenza A virus
acacucuuuguccaaaaug

SEQ ID NO: 8838 - RNA, 19 nt, Influenza A virus
auacgauuuguccaaaaug

SEQ ID NO: 8839 - RNA, 19 nt, Influenza A virus
uagacgcuuuguccagaau

SEQ ID NO: 8840 - RNA, 19 nt, Influenza A virus
uagacgcuuuguucaaaau

SEQ ID NO: 8841 - RNA, 19 nt, Influenza A virus
uagacguuuuguccaaaau

SEQ ID NO: 8842 - RNA, 19 nt, Influenza A virus
uacacgcuuuguccaaaau

SEQ ID NO: 8843 - RNA, 19 nt, Influenza A virus
uagacgauuuguccaaaau

SEQ ID NO: 8844 - RNA, 19 nt, Influenza A virus
uagacgcuucguccaaaau

SEQ ID NO: 8845 - RNA, 19 nt, Influenza A virus
uagacgcuuuguccaaaac

SEQ ID NO: 8846 - RNA, 19 nt, Influenza A virus
uagacgguuuguccaaaau

SEQ ID NO: 8847 - RNA, 19 nt, Influenza A virus
uauacgcuuuguccaaaau

SEQ ID NO: 8848 - RNA, 19 nt, Influenza A virus
uaaacgcuuuguccagaau

SEQ ID NO: 8849 - RNA, 19 nt, Influenza A virus
uagacgcuuuguccagaac

SEQ ID NO: 8850 - RNA, 19 nt, Influenza A virus
uacacucuuuguccaaaau

SEQ ID NO: 8851 - RNA, 19 nt, Influenza A virus
uauacgauuuguccaaaau

SEQ ID NO: 8852 - RNA, 19 nt, Influenza A virus
gacgcuuuguccaaaaugu

SEQ ID NO: 8853 - RNA, 19 nt, Influenza A virus
gacgcuuuguccagaaugc

SEQ ID NO: 8854 - RNA, 19 nt, Influenza A virus
gacgcuuuguucaaaaugc

SEQ ID NO: 8855 - RNA, 19 nt, Influenza A virus
gacguuuuguccaaaaugc

SEQ ID NO: 8856 - RNA, 19 nt, Influenza A virus
cacgcuuuguccaaaaugc

SEQ ID NO: 8857 - RNA, 19 nt, Influenza A virus
gacgauuuguccaaaaugc

SEQ ID NO: 8858 - RNA, 19 nt, Influenza A virus
gacgcuucguccaaaaugc

SEQ ID NO: 8859 - RNA, 19 nt, Influenza A virus
gacgcuuuguccaaaacgc

SEQ ID NO: 8860 - RNA, 19 nt, Influenza A virus
gacgguuuguccaaaaugc

SEQ ID NO: 8861 - RNA, 19 nt, Influenza A virus
uacgcuuuguccaaaaugc

SEQ ID NO: 8862 - RNA, 19 nt, Influenza A virus
aacgcuuuguccagaaugc

SEQ ID NO: 8863 - RNA, 19 nt, Influenza A virus
gacgcuuuguccagaacgc

SEQ ID NO: 8864 - RNA, 19 nt, Influenza A virus
cacucuuuguccaaaaugc

SEQ ID NO: 8865 - RNA, 19 nt, Influenza A virus
uacgauuuguccaaaaugc

SEQ ID NO: 8866 - RNA, 19 nt, Influenza A virus
acgcuuuguccaaaaugcu

SEQ ID NO: 8867 - RNA, 19 nt, Influenza A virus
acgcuuuguccaaaauguc

SEQ ID NO: 8868 - RNA, 19 nt, Influenza A virus
acgcuuuguccagaaugcc

SEQ ID NO: 8869 - RNA, 19 nt, Influenza A virus
acgcuuuguucaaaaugcc

SEQ ID NO: 8870 - RNA, 19 nt, Influenza A virus
acguuuuguccaaaaugcc

SEQ ID NO: 8871 - RNA, 19 nt, Influenza A virus
acgauuuguccaaaaugcc

SEQ ID NO: 8872 - RNA, 19 nt, Influenza A virus
acgcuucguccaaaaugcc

SEQ ID NO: 8873 - RNA, 19 nt, Influenza A virus
acgcuuuguccaaaacgcc

SEQ ID NO: 8874 - RNA, 19 nt, Influenza A virus
acgcuuuguccaaaaugca

SEQ ID NO: 8875 - RNA, 19 nt, Influenza A virus
acgguuuguccaaaaugcc

SEQ ID NO: 8876 - RNA, 19 nt, Influenza A virus
acucuuuguccaaaaugcc

SEQ ID NO: 8877 - RNA, 19 nt, Influenza A virus
acgcuuuguccagaacgcc

SEQ ID NO: 8878 - RNA, 19 nt, Influenza A virus
gcuuuguccaaaaugcucu

SEQ ID NO: 8879 - RNA, 19 nt, Influenza A virus
gcuuuguccaaaauguccu

SEQ ID NO: 8880 - RNA, 19 nt, Influenza A virus
gcuuuguccagaaugcccu

SEQ ID NO: 8881 - RNA, 19 nt, Influenza A virus
gcuuuguucaaaaugcccu

SEQ ID NO: 8882 - RNA, 19 nt, Influenza A virus
guuuuguccaaaaugcccu

SEQ ID NO: 8883 - RNA, 19 nt, Influenza A virus
gauuuguccaaaaugcccu

SEQ ID NO: 8884 - RNA, 19 nt, Influenza A virus
gcuucguccaaaaugcccu

SEQ ID NO: 8885 - RNA, 19 nt, Influenza A virus
gcuuuguccaaaacgcccu

SEQ ID NO: 8886 - RNA, 19 nt, Influenza A virus
gcuuuguccaaaaugcacu

SEQ ID NO: 8887 - RNA, 19 nt, Influenza A virus
gguuuguccaaaaugcccu

SEQ ID NO: 8888 - RNA, 19 nt, Influenza A virus
ucuuuguccaaaaugcccu

SEQ ID NO: 8889 - RNA, 19 nt, Influenza A virus
gcuuuguccagaacgcccu

SEQ ID NO: 8890 - RNA, 19 nt, Influenza A virus
cgcuuuguccaaaaugcuc

SEQ ID NO: 8891 - RNA, 19 nt, Influenza A virus
cgcuuuguccaaaaugucc

SEQ ID NO: 8892 - RNA, 19 nt, Influenza A virus
cgcuuuguccagaaugccc

SEQ ID NO: 8893 - RNA, 19 nt, Influenza A virus
cgcuuuguucaaaaugccc

SEQ ID NO: 8894 - RNA, 19 nt, Influenza A virus
cguuuuguccaaaaugccc

SEQ ID NO: 8895 - RNA, 19 nt, Influenza A virus
cgauuuguccaaaaugccc

SEQ ID NO: 8896 - RNA, 19 nt, Influenza A virus
cgcuucguccaaaaugccc

SEQ ID NO: 8897 - RNA, 19 nt, Influenza A virus
cgcuuuguccaaaacgccc

SEQ ID NO: 8898 - RNA, 19 nt, Influenza A virus
cgcuuuguccaaaaugcac

SEQ ID NO: 8899 - RNA, 19 nt, Influenza A virus
cgguuuguccaaaaugccc

SEQ ID NO: 8900 - RNA, 19 nt, Influenza A virus
cucuuuguccaaaaugccc

SEQ ID NO: 8901 - RNA, 19 nt, Influenza A virus
cgcuuuguccagaacgccc

SEQ ID NO: 8902 - RNA, 19 nt, Influenza A virus
ucgguuauucugcuggugc

SEQ ID NO: 8903 - RNA, 19 nt, Influenza A virus
uuaguuauucugcuggugc

SEQ ID NO: 8904 - RNA, 19 nt, Influenza A virus
ucagcuauucugcuggugc

SEQ ID NO: 8905 - RNA, 19 nt, Influenza A virus
ucaguuacucugcuggugc

SEQ ID NO: 8906 - RNA, 19 nt, Influenza A virus
ucaguuauuccgcuggugc

SEQ ID NO: 8907 - RNA, 19 nt, Influenza A virus
ucaguuauucggcuggugc

SEQ ID NO: 8908 - RNA, 19 nt, Influenza A virus
ucaguuauucugccggugc

SEQ ID NO: 8909 - RNA, 19 nt, Influenza A virus
ucaguuauucugcuggcgc

SEQ ID NO: 8910 - RNA, 19 nt, Influenza A virus
auucugcuggugcgcuugc

SEQ ID NO: 8911 - RNA, 19 nt, Influenza A virus
acucugcuggugcacuugc

SEQ ID NO: 8912 - RNA, 19 nt, Influenza A virus
auuccgcuggugcacuugc

SEQ ID NO: 8913 - RNA, 19 nt, Influenza A virus
auucggcuggugcacuugc

SEQ ID NO: 8914 - RNA, 19 nt, Influenza A virus
auucugccggugcacuugc

SEQ ID NO: 8915 - RNA, 19 nt, Influenza A virus
auucugcuggcgcacuugc

SEQ ID NO: 8916 - RNA, 19 nt, Influenza A virus
cucauggaauggcugaaga

SEQ ID NO: 8917 - RNA, 19 nt, Influenza A virus
cucauggaaugguuaaaga

SEQ ID NO: 8918 - RNA, 19 nt, Influenza A virus
cucauggaguggcuaaaga

SEQ ID NO: 8919 - RNA, 19 nt, Influenza A virus
cuaauggaauggcuaaaga

SEQ ID NO: 8920 - RNA, 19 nt, Influenza A virus
cucacggaauggcuaaaga

SEQ ID NO: 8921 - RNA, 19 nt, Influenza A virus
ucauggaauggcugaagac

SEQ ID NO: 8922 - RNA, 19 nt, Influenza A virus
ucauggaaugguuaaagac

SEQ ID NO: 8923 - RNA, 19 nt, Influenza A virus
ucauggaguggcuaaagac

SEQ ID NO: 8924 - RNA, 19 nt, Influenza A virus
uaauggaauggcuaaagac

SEQ ID NO: 8925 - RNA, 19 nt, Influenza A virus
ucacggaauggcuaaagac

SEQ ID NO: 8926 - RNA, 19 nt, Influenza A virus
uauucugcuggugcgcuug

SEQ ID NO: 8927 - RNA, 19 nt, Influenza A virus
uacucugcuggugcacuug

SEQ ID NO: 8928 - RNA, 19 nt, Influenza A virus
uauuccgcuggugcacuug

SEQ ID NO: 8929 - RNA, 19 nt, Influenza A virus
uauucggcuggugcacuug

SEQ ID NO: 8930 - RNA, 19 nt, Influenza A virus
uauucugccggugcacuug

SEQ ID NO: 8931 - RNA, 19 nt, Influenza A virus
uauucugcuggcgcacuug

SEQ ID NO: 8932 - RNA, 19 nt, Influenza A virus
auggaauggcugaagacaa

SEQ ID NO: 8933 - RNA, 19 nt, Influenza A virus
auggaaugguuaaagacaa

SEQ ID NO: 8934 - RNA, 19 nt, Influenza A virus
auggaguggcuaaagacaa

SEQ ID NO: 8935 - RNA, 19 nt, Influenza A virus
acggaauggcuaaagacaa

SEQ ID NO: 8936 - RNA, 19 nt, Influenza A virus
auggaauggcuaaagacua

SEQ ID NO: 8937 - RNA, 19 nt, Influenza A virus
cucgguuauucugcuggug

SEQ ID NO: 8938 - RNA, 19 nt, Influenza A virus
cuuaguuauucugcuggug

SEQ ID NO: 8939 - RNA, 19 nt, Influenza A virus
uucaguuauucugcuggug

SEQ ID NO: 8940 - RNA, 19 nt, Influenza A virus
cucagcuauucugcuggug

SEQ ID NO: 8941 - RNA, 19 nt, Influenza A virus
cucaguuacucugcuggug

SEQ ID NO: 8942 - RNA, 19 nt, Influenza A virus
cucaguuauuccgcuggug

SEQ ID NO: 8943 - RNA, 19 nt, Influenza A virus
cucaguuauucggcuggug

SEQ ID NO: 8944 - RNA, 19 nt, Influenza A virus
cucaguuauucugccggug

SEQ ID NO: 8945 - RNA, 19 nt, Influenza A virus
cucaguuauucugcuggcg

SEQ ID NO: 8946 - RNA, 19 nt, Influenza A virus
guuauucugcuggugcgcu

SEQ ID NO: 8947 - RNA, 19 nt, Influenza A virus
gcuauucugcuggugcacu

SEQ ID NO: 8948 - RNA, 19 nt, Influenza A virus
guuacucugcuggugcacu

SEQ ID NO: 8949 - RNA, 19 nt, Influenza A virus
guuauuccgcuggugcacu

SEQ ID NO: 8950 - RNA, 19 nt, Influenza A virus
guuauucggcuggugcacu

SEQ ID NO: 8951 - RNA, 19 nt, Influenza A virus
guuauucugccggugcacu

SEQ ID NO: 8952 - RNA, 19 nt, Influenza A virus
guuauucugcuggcgcacu

SEQ ID NO: 8953 - RNA, 19 nt, Influenza A virus
uggccagcacuacggcuaa

SEQ ID NO: 8954 - RNA, 19 nt, Influenza A virus
uggccagcauuacagcuaa

SEQ ID NO: 8955 - RNA, 19 nt, Influenza A virus
uggccaguacuacagcuaa

SEQ ID NO: 8956 - RNA, 19 nt, Influenza A virus
uggccaguacuacggcuaa

SEQ ID NO: 8957 - RNA, 19 nt, Influenza A virus
uagccagcacuacagcuaa

SEQ ID NO: 8958 - RNA, 19 nt, Influenza A virus
uggcaagcacuacagcuaa

SEQ ID NO: 8959 - RNA, 19 nt, Influenza A virus
uggccagcaccacagcuaa

SEQ ID NO: 8960 - RNA, 19 nt, Influenza A virus
uggccagcacuacagccaa

SEQ ID NO: 8961 - RNA, 19 nt, Influenza A virus
uggccagcacuacagcuua

SEQ ID NO: 8962 - RNA, 19 nt, Influenza A virus
uggccagcacuaccgcuaa

SEQ ID NO: 8963 - RNA, 19 nt, Influenza A virus
uagccagcacuacggcuaa

SEQ ID NO: 8964 - RNA, 19 nt, Influenza A virus
uggcuagcaccacagcuaa

SEQ ID NO: 8965 - RNA, 19 nt, Influenza A virus
uagccagcacaacagcuaa

SEQ ID NO: 8966 - RNA, 19 nt, Influenza A virus
uagccagcacuacagccaa

SEQ ID NO: 8967 - RNA, 19 nt, Influenza A virus
uagccagcaccacggcuaa

SEQ ID NO: 8968 - RNA, 19 nt, Influenza A virus
uuauucugcuggugcgcuu

SEQ ID NO: 8969 - RNA, 19 nt, Influenza A virus
cuauucugcuggugcacuu

SEQ ID NO: 8970 - RNA, 19 nt, Influenza A virus
uuacucugcuggugcacuu

SEQ ID NO: 8971 - RNA, 19 nt, Influenza A virus
uuauuccgcuggugcacuu

SEQ ID NO: 8972 - RNA, 19 nt, Influenza A virus
uuauucggcuggugcacuu

SEQ ID NO: 8973 - RNA, 19 nt, Influenza A virus
uuauucugccggugcacuu

SEQ ID NO: 8974 - RNA, 19 nt, Influenza A virus
uuauucugcuggcgcacuu

SEQ ID NO: 8975 - RNA, 19 nt, Influenza A virus
cauggaauggcugaagaca

SEQ ID NO: 8976 - RNA, 19 nt, Influenza A virus
cauggaaugguuaaagaca

SEQ ID NO: 8977 - RNA, 19 nt, Influenza A virus
cauggaguggcuaaagaca

SEQ ID NO: 8978 - RNA, 19 nt, Influenza A virus
aauggaauggcuaaagaca

SEQ ID NO: 8979 - RNA, 19 nt, Influenza A virus
cacggaauggcuaaagaca

SEQ ID NO: 8980 - RNA, 19 nt, Influenza A virus
cauggaauggcuaaagacu

SEQ ID NO: 8981 - RNA, 19 nt, Influenza A virus
uggaauggcugaagacaag

SEQ ID NO: 8982 - RNA, 19 nt, Influenza A virus
uggaaugguuaaagacaag

SEQ ID NO: 8983 - RNA, 19 nt, Influenza A virus
uggaguggcuaaagacaag

SEQ ID NO: 8984 - RNA, 19 nt, Influenza A virus
cggaauggcuaaagacaag

SEQ ID NO: 8985 - RNA, 19 nt, Influenza A virus
uggaauggcuaaagacaaa

SEQ ID NO: 8986 - RNA, 19 nt, Influenza A virus
uggaauggcuaaagacuag

SEQ ID NO: 8987 - RNA, 19 nt, Influenza A virus
ucucauggaauggcugaag

SEQ ID NO: 8988 - RNA, 19 nt, Influenza A virus
ucucauggaaugguuaaag

SEQ ID NO: 8989 - RNA, 19 nt, Influenza A virus
ucucauggaguggcuaaag

SEQ ID NO: 8990 - RNA, 19 nt, Influenza A virus
acucauggaauggcuaaag

SEQ ID NO: 8991 - RNA, 19 nt, Influenza A virus
ucuaauggaauggcuaaag

SEQ ID NO: 8992 - RNA, 19 nt, Influenza A virus
ucucacggaauggcuaaag

SEQ ID NO: 8993 - RNA, 19 nt, Influenza A virus
aguuauucugcuggugcgc

SEQ ID NO: 8994 - RNA, 19 nt, Influenza A virus
gguuauucugcuggugcac

SEQ ID NO: 8995 - RNA, 19 nt, Influenza A virus
agcuauucugcuggugcac

SEQ ID NO: 8996 - RNA, 19 nt, Influenza A virus
aguuacucugcuggugcac

SEQ ID NO: 8997 - RNA, 19 nt, Influenza A virus
aguuauuccgcuggugcac

SEQ ID NO: 8998 - RNA, 19 nt, Influenza A virus
aguuauucggcuggugcac

SEQ ID NO: 8999 - RNA, 19 nt, Influenza A virus
aguuauucugccggugcac

SEQ ID NO: 9000 - RNA, 19 nt, Influenza A virus
aguuauucugcuggcgcac

SEQ ID NO: 9001 - RNA, 19 nt, Influenza A virus
ggaauggcuaaagacaagg

SEQ ID NO: 9002 - RNA, 19 nt, Influenza A virus
ggaauggcugaagacaaga

SEQ ID NO: 9003 - RNA, 19 nt, Influenza A virus
ggaaugguuaaagacaaga

SEQ ID NO: 9004 - RNA, 19 nt, Influenza A virus
ggaguggcuaaagacaaga

SEQ ID NO: 9005 - RNA, 19 nt, Influenza A virus
ggaauggcuaaagacaaaa

SEQ ID NO: 9006 - RNA, 19 nt, Influenza A virus
ggaauggcuaaagacuaga

SEQ ID NO: 9007 - RNA, 19 nt, Influenza A virus
aauggcuaaagacaaggcc

SEQ ID NO: 9008 - RNA, 19 nt, Influenza A virus
aauggcugaagacaagacc

SEQ ID NO: 9009 - RNA, 19 nt, Influenza A virus
aaugguuaaagacaagacc

SEQ ID NO: 9010 - RNA, 19 nt, Influenza A virus
aguggcuaaagacaagacc

SEQ ID NO: 9011 - RNA, 19 nt, Influenza A virus
aauggcuaaagacaaaacc

SEQ ID NO: 9012 - RNA, 19 nt, Influenza A virus
aauggcuaaagacuagacc

SEQ ID NO: 9013 - RNA, 19 nt, Influenza A virus
gaauggcuaaagacaaggc

SEQ ID NO: 9014 - RNA, 19 nt, Influenza A virus
gaauggcugaagacaagac

SEQ ID NO: 9015 - RNA, 19 nt, Influenza A virus
gaaugguuaaagacaagac

SEQ ID NO: 9016 - RNA, 19 nt, Influenza A virus
gaguggcuaaagacaagac

SEQ ID NO: 9017 - RNA, 19 nt, Influenza A virus
gaauggcuaaagacaaaac

SEQ ID NO: 9018 - RNA, 19 nt, Influenza A virus
gaauggcuaaagacuagac

SEQ ID NO: 9019 - RNA, 19 nt, Influenza A virus
uccauggggccaaagaagu

SEQ ID NO: 9020 - RNA, 19 nt, Influenza A virus
uccauggggccaaagagau

SEQ ID NO: 9021 - RNA, 19 nt, Influenza A virus
uccauggggccaaaggaau

SEQ ID NO: 9022 - RNA, 19 nt, Influenza A virus
uccauggggccaaggaaau

SEQ ID NO: 9023 - RNA, 19 nt, Influenza A virus
uccauggggcuaaagaaau

SEQ ID NO: 9024 - RNA, 19 nt, Influenza A virus
ucuauggggccaaagaaau

SEQ ID NO: 9025 - RNA, 19 nt, Influenza A virus
uucauggggccaaagaaau

SEQ ID NO: 9026 - RNA, 19 nt, Influenza A virus
uccauggggccaaggaggu

SEQ ID NO: 9027 - RNA, 19 nt, Influenza A virus
uccauggagccaaagaaau

SEQ ID NO: 9028 - RNA, 19 nt, Influenza A virus
uccacggggccaaagaagu

SEQ ID NO: 9029 - RNA, 19 nt, Influenza A virus
uucauggggccaaaguaau

SEQ ID NO: 9030 - RNA, 19 nt, Influenza A virus
gcguagacgcuuuguccag

SEQ ID NO: 9031 - RNA, 19 nt, Influenza A virus
gcguagacgcuuuguucaa

SEQ ID NO: 9032 - RNA, 19 nt, Influenza A virus
gcguagacguuuuguccaa

SEQ ID NO: 9033 - RNA, 19 nt, Influenza A virus
acguagacgcuuuguccaa

SEQ ID NO: 9034 - RNA, 19 nt, Influenza A virus
gcguacacgcuuuguccaa

SEQ ID NO: 9035 - RNA, 19 nt, Influenza A virus
gcguagacgauuuguccaa

SEQ ID NO: 9036 - RNA, 19 nt, Influenza A virus
gcguagacgcuucguccaa

SEQ ID NO: 9037 - RNA, 19 nt, Influenza A virus
gcguagacgguuuguccaa

SEQ ID NO: 9038 - RNA, 19 nt, Influenza A virus
gcguauacgcuuuguccaa

SEQ ID NO: 9039 - RNA, 19 nt, Influenza A virus
acguagacgcuuuguucaa

SEQ ID NO: 9040 - RNA, 19 nt, Influenza A virus
gcguaaacgcuuuguccag

SEQ ID NO: 9041 - RNA, 19 nt, Influenza A virus
acguauacgcuuuguccaa

SEQ ID NO: 9042 - RNA, 19 nt, Influenza A virus
gcguauacgauuuguccaa

SEQ ID NO: 9043 - RNA, 19 nt, Influenza A virus
caguuauucugcuggugcg

SEQ ID NO: 9044 - RNA, 19 nt, Influenza A virus
cgguuauucugcuggugca

SEQ ID NO: 9045 - RNA, 19 nt, Influenza A virus
uaguuauucugcuggugca

SEQ ID NO: 9046 - RNA, 19 nt, Influenza A virus
cagcuauucugcuggugca

SEQ ID NO: 9047 - RNA, 19 nt, Influenza A virus
caguuacucugcuggugca

SEQ ID NO: 9048 - RNA, 19 nt, Influenza A virus
caguuauuccgcuggugca

SEQ ID NO: 9049 - RNA, 19 nt, Influenza A virus
caguuauucggcuggugca

SEQ ID NO: 9050 - RNA, 19 nt, Influenza A virus
caguuauucugccggugca

SEQ ID NO: 9051 - RNA, 19 nt, Influenza A virus
caguuauucugcuggcgca

SEQ ID NO: 9052 - RNA, 19 nt, Influenza A virus
uuccauggggccaaagaag

SEQ ID NO: 9053 - RNA, 19 nt, Influenza A virus
uuccauggggccaaagaga

SEQ ID NO: 9054 - RNA, 19 nt, Influenza A virus
uuccauggggccaaaggaa

SEQ ID NO: 9055 - RNA, 19 nt, Influenza A virus
uuccauggggccaaggaaa

SEQ ID NO: 9056 - RNA, 19 nt, Influenza A virus
uuccauggggcuaaagaaa

SEQ ID NO: 9057 - RNA, 19 nt, Influenza A virus
uucuauggggccaaagaaa

SEQ ID NO: 9058 - RNA, 19 nt, Influenza A virus
uuucauggggccaaagaaa

SEQ ID NO: 9059 - RNA, 19 nt, Influenza A virus
uuccauggggccaaggagg

SEQ ID NO: 9060 - RNA, 19 nt, Influenza A virus
uuccauggagccaaagaaa

SEQ ID NO: 9061 - RNA, 19 nt, Influenza A virus
uuccacggggccaaagaag

SEQ ID NO: 9062 - RNA, 19 nt, Influenza A virus
uuucauggggccaaaguaa

SEQ ID NO: 9063 - RNA, 19 nt, Influenza A virus
caccucugacuagggggau

SEQ ID NO: 9064 - RNA, 19 nt, Influenza A virus
caccucuaacuaaggggau

SEQ ID NO: 9065 - RNA, 19 nt, Influenza A virus
caccucugacaaaggggau

SEQ ID NO: 9066 - RNA, 19 nt, Influenza A virus
caccucugaccaaggggau

SEQ ID NO: 9067 - RNA, 19 nt, Influenza A virus
caccucugacuaaagggau

SEQ ID NO: 9068 - RNA, 19 nt, Influenza A virus
caccucugacuaagggaau

SEQ ID NO: 9069 - RNA, 19 nt, Influenza A virus
caccucugacuaaggguau

SEQ ID NO: 9070 - RNA, 19 nt, Influenza A virus
caccucuuacuaaggggau

SEQ ID NO: 9071 - RNA, 19 nt, Influenza A virus
caccucugaccaagggaau

SEQ ID NO: 9072 - RNA, 19 nt, Influenza A virus
gucaccucugacuaggggg

SEQ ID NO: 9073 - RNA, 19 nt, Influenza A virus
gucaccucuaacuaagggg

SEQ ID NO: 9074 - RNA, 19 nt, Influenza A virus
gucaccucugacaaagggg

SEQ ID NO: 9075 - RNA, 19 nt, Influenza A virus
gucaccucugaccaagggg

SEQ ID NO: 9076 - RNA, 19 nt, Influenza A virus
gucaccucugacuaaaggg

SEQ ID NO: 9077 - RNA, 19 nt, Influenza A virus
gucaccucugacuaaggga

SEQ ID NO: 9078 - RNA, 19 nt, Influenza A virus
gucaccucugacuaagggu

SEQ ID NO: 9079 - RNA, 19 nt, Influenza A virus
gucaccucuuacuaagggg

SEQ ID NO: 9080 - RNA, 19 nt, Influenza A virus
gucaccucugaccaaggga

SEQ ID NO: 9081 - RNA, 19 nt, Influenza A virus
ucaccucugacuaggggga

SEQ ID NO: 9082 - RNA, 19 nt, Influenza A virus
ucaccucuaacuaagggga

SEQ ID NO: 9083 - RNA, 19 nt, Influenza A virus
ucaccucugacaaagggga

SEQ ID NO: 9084 - RNA, 19 nt, Influenza A virus
ucaccucugaccaagggga

SEQ ID NO: 9085 - RNA, 19 nt, Influenza A virus
ucaccucugacuaaaggga

SEQ ID NO: 9086 - RNA, 19 nt, Influenza A virus
ucaccucugacuaagggaa

SEQ ID NO: 9087 - RNA, 19 nt, Influenza A virus
ucaccucugacuaagggua

SEQ ID NO: 9088 - RNA, 19 nt, Influenza A virus
ucaccucuuacuaagggga

SEQ ID NO: 9089 - RNA, 19 nt, Influenza A virus
ucaccucugaccaagggaa

SEQ ID NO: 9090 - RNA, 19 nt, Influenza A virus
cuggugcacuugcuaguug

SEQ ID NO: 9091 - RNA, 19 nt, Influenza A virus
cuggugcgcuugccaguug

SEQ ID NO: 9092 - RNA, 19 nt, Influenza A virus
ccggugcacuugccaguug

SEQ ID NO: 9093 - RNA, 19 nt, Influenza A virus
cuggcgcacuugccaguug

SEQ ID NO: 9094 - RNA, 19 nt, Influenza A virus
cuggugcgcuugccagcug

SEQ ID NO: 9095 - RNA, 19 nt, Influenza A virus
ccggggcacuugccaguug

SEQ ID NO: 9096 - RNA, 19 nt, Influenza A virus
gaggcucucauggaauggu

SEQ ID NO: 9097 - RNA, 19 nt, Influenza A virus
gaggcucucauggaguggc

SEQ ID NO: 9098 - RNA, 19 nt, Influenza A virus
gagguucucauggaauggc

SEQ ID NO: 9099 - RNA, 19 nt, Influenza A virus
gaagcucucauggaauggc

SEQ ID NO: 9100 - RNA, 19 nt, Influenza A virus
gaggcacucauggaauggc

SEQ ID NO: 9101 - RNA, 19 nt, Influenza A virus
gaggcucuaauggaauggc

SEQ ID NO: 9102 - RNA, 19 nt, Influenza A virus
gaggcucucacggaauggc

SEQ ID NO: 9103 - RNA, 19 nt, Influenza A virus
gagguucucacggaauggc

SEQ ID NO: 9104 - RNA, 19 nt, Influenza A virus
gcucucauggaauggcuga

SEQ ID NO: 9105 - RNA, 19 nt, Influenza A virus
gcucucauggaaugguuaa

SEQ ID NO: 9106 - RNA, 19 nt, Influenza A virus
gcucucauggaguggcuaa

SEQ ID NO: 9107 - RNA, 19 nt, Influenza A virus
guucucauggaauggcuaa

SEQ ID NO: 9108 - RNA, 19 nt, Influenza A virus
gcacucauggaauggcuaa

SEQ ID NO: 9109 - RNA, 19 nt, Influenza A virus
gcucuaauggaauggcuaa

SEQ ID NO: 9110 - RNA, 19 nt, Influenza A virus
gcucucacggaauggcuaa

SEQ ID NO: 9111 - RNA, 19 nt, Influenza A virus
guucucacggaauggcuaa

SEQ ID NO: 9112 - RNA, 19 nt, Influenza A virus
cucucauggaauggcugaa

SEQ ID NO: 9113 - RNA, 19 nt, Influenza A virus
cucucauggaaugguuaaa

SEQ ID NO: 9114 - RNA, 19 nt, Influenza A virus
cucucauggaguggcuaaa

SEQ ID NO: 9115 - RNA, 19 nt, Influenza A virus
uucucauggaauggcuaaa

SEQ ID NO: 9116 - RNA, 19 nt, Influenza A virus
cacucauggaauggcuaaa

SEQ ID NO: 9117 - RNA, 19 nt, Influenza A virus
cucuaauggaauggcuaaa

SEQ ID NO: 9118 - RNA, 19 nt, Influenza A virus
cucucacggaauggcuaaa

SEQ ID NO: 9119 - RNA, 19 nt, Influenza A virus
uucucacggaauggcuaaa

SEQ ID NO: 9120 - RNA, 19 nt, Influenza A virus
auggggccaaagaaguagc

SEQ ID NO: 9121 - RNA, 19 nt, Influenza A virus
auggggccaaagagauagc

SEQ ID NO: 9122 - RNA, 19 nt, Influenza A virus
auggggccaaaggaauagc

SEQ ID NO: 9123 - RNA, 19 nt, Influenza A virus
auggggccaaggaaauagc

SEQ ID NO: 9124 - RNA, 19 nt, Influenza A virus
auggggcuaaagaaauagc

SEQ ID NO: 9125 - RNA, 19 nt, Influenza A virus
auggagccaaagaaauagc

SEQ ID NO: 9126 - RNA, 19 nt, Influenza A virus
auggggccaaagaaauauc

SEQ ID NO: 9127 - RNA, 19 nt, Influenza A virus
auggggccaaagaaaucgc

SEQ ID NO: 9128 - RNA, 19 nt, Influenza A virus
auggggccaaaguaauagc

SEQ ID NO: 9129 - RNA, 19 nt, Influenza A virus
acggggccaaagaaguagc

SEQ ID NO: 9130 - RNA, 19 nt, Influenza A virus
auggggccaaagaaaucuc

SEQ ID NO: 9131 - RNA, 19 nt, Influenza A virus
aggcucucauggaaugguu

SEQ ID NO: 9132 - RNA, 19 nt, Influenza A virus
aggcucucauggaguggcu

SEQ ID NO: 9133 - RNA, 19 nt, Influenza A virus
agguucucauggaauggcu

SEQ ID NO: 9134 - RNA, 19 nt, Influenza A virus
aagcucucauggaauggcu

SEQ ID NO: 9135 - RNA, 19 nt, Influenza A virus
aggcacucauggaauggcu

SEQ ID NO: 9136 - RNA, 19 nt, Influenza A virus
aggcucuaauggaauggcu

SEQ ID NO: 9137 - RNA, 19 nt, Influenza A virus
aggcucucacggaauggcu

SEQ ID NO: 9138 - RNA, 19 nt, Influenza A virus
agguucucacggaauggcu

SEQ ID NO: 9139 - RNA, 19 nt, Influenza A virus
ggcucucauggaauggcug

SEQ ID NO: 9140 - RNA, 19 nt, Influenza A virus
ggcucucauggaaugguua

SEQ ID NO: 9141 - RNA, 19 nt, Influenza A virus
ggcucucauggaguggcua

SEQ ID NO: 9142 - RNA, 19 nt, Influenza A virus
gguucucauggaauggcua

SEQ ID NO: 9143 - RNA, 19 nt, Influenza A virus
agcucucauggaauggcua

SEQ ID NO: 9144 - RNA, 19 nt, Influenza A virus
ggcacucauggaauggcua

SEQ ID NO: 9145 - RNA, 19 nt, Influenza A virus
ggcucuaauggaauggcua

SEQ ID NO: 9146 - RNA, 19 nt, Influenza A virus
ggcucucacggaauggcua

SEQ ID NO: 9147 - RNA, 19 nt, Influenza A virus
gguucucacggaauggcua

SEQ ID NO: 9148 - RNA, 19 nt, Influenza A virus
uugaggcucucauggagug

SEQ ID NO: 9149 - RNA, 19 nt, Influenza A virus
uugagguucucauggaaug

SEQ ID NO: 9150 - RNA, 19 nt, Influenza A virus
uagaggcucucauggaaug

SEQ ID NO: 9151 - RNA, 19 nt, Influenza A virus
ucgaggcucucauggaaug

SEQ ID NO: 9152 - RNA, 19 nt, Influenza A virus
uugaagcucucauggaaug

SEQ ID NO: 9153 - RNA, 19 nt, Influenza A virus
uugaggcacucauggaaug

SEQ ID NO: 9154 - RNA, 19 nt, Influenza A virus
uugaggcucuaauggaaug

SEQ ID NO: 9155 - RNA, 19 nt, Influenza A virus
uugaggcucucacggaaug

SEQ ID NO: 9156 - RNA, 19 nt, Influenza A virus
ucgaggcucucauggagug

SEQ ID NO: 9157 - RNA, 19 nt, Influenza A virus
uugagguucucacggaaug

SEQ ID NO: 9158 - RNA, 19 nt, Influenza A virus
ugaggcucucauggagugg

SEQ ID NO: 9159 - RNA, 19 nt, Influenza A virus
ugagguucucauggaaugg

SEQ ID NO: 9160 - RNA, 19 nt, Influenza A virus
agaggcucucauggaaugg

SEQ ID NO: 9161 - RNA, 19 nt, Influenza A virus
cgaggcucucauggaaugg

SEQ ID NO: 9162 - RNA, 19 nt, Influenza A virus
ugaagcucucauggaaugg

SEQ ID NO: 9163 - RNA, 19 nt, Influenza A virus
ugaggcacucauggaaugg

SEQ ID NO: 9164 - RNA, 19 nt, Influenza A virus
ugaggcucuaauggaaugg

SEQ ID NO: 9165 - RNA, 19 nt, Influenza A virus
ugaggcucucacggaaugg

SEQ ID NO: 9166 - RNA, 19 nt, Influenza A virus
cgaggcucucauggagugg

SEQ ID NO: 9167 - RNA, 19 nt, Influenza A virus
ugagguucucacggaaugg

SEQ ID NO: 9168 - RNA, 19 nt, Influenza A virus
cuugaggcucucauggagu

SEQ ID NO: 9169 - RNA, 19 nt, Influenza A virus
cuugagguucucauggaau

SEQ ID NO: 9170 - RNA, 19 nt, Influenza A virus
cuagaggcucucauggaau

SEQ ID NO: 9171 - RNA, 19 nt, Influenza A virus
cucgaggcucucauggaau

SEQ ID NO: 9172 - RNA, 19 nt, Influenza A virus
cuugaagcucucauggaau

SEQ ID NO: 9173 - RNA, 19 nt, Influenza A virus
cuugaggcacucauggaau

SEQ ID NO: 9174 - RNA, 19 nt, Influenza A virus
cuugaggcucuaauggaau

SEQ ID NO: 9175 - RNA, 19 nt, Influenza A virus
cuugaggcucucacggaau

SEQ ID NO: 9176 - RNA, 19 nt, Influenza A virus
cucgaggcucucauggagu

SEQ ID NO: 9177 - RNA, 19 nt, Influenza A virus
cuugagguucucacggaau

SEQ ID NO: 9178 - RNA, 19 nt, Influenza A virus
cauggggccaaagaaguag

SEQ ID NO: 9179 - RNA, 19 nt, Influenza A virus
cauggggccaaagagauag

SEQ ID NO: 9180 - RNA, 19 nt, Influenza A virus
cauggggccaaaggaauag

SEQ ID NO: 9181 - RNA, 19 nt, Influenza A virus
cauggggccaaggaaauag

SEQ ID NO: 9182 - RNA, 19 nt, Influenza A virus
cauggggcuaaagaaauag

SEQ ID NO: 9183 - RNA, 19 nt, Influenza A virus
uauggggccaaagaaauag

SEQ ID NO: 9184 - RNA, 19 nt, Influenza A virus
cauggagccaaagaaauag

SEQ ID NO: 9185 - RNA, 19 nt, Influenza A virus
cauggggccaaagaaauau

SEQ ID NO: 9186 - RNA, 19 nt, Influenza A virus
cauggggccaaagaaaucg

SEQ ID NO: 9187 - RNA, 19 nt, Influenza A virus
cauggggccaaaguaauag

SEQ ID NO: 9188 - RNA, 19 nt, Influenza A virus
cacggggccaaagaaguag

SEQ ID NO: 9189 - RNA, 19 nt, Influenza A virus
uauggggccaaagaaaucg

SEQ ID NO: 9190 - RNA, 19 nt, Influenza A virus
cauggggccaaagaaaucu

SEQ ID NO: 9191 - RNA, 19 nt, Influenza A virus
gcuggugcacuugcuaguu

SEQ ID NO: 9192 - RNA, 19 nt, Influenza A virus
gcuggugcgcuugccaguu

SEQ ID NO: 9193 - RNA, 19 nt, Influenza A virus
acuggugcacuugccaguu

SEQ ID NO: 9194 - RNA, 19 nt, Influenza A virus
gccggugcacuugccaguu

SEQ ID NO: 9195 - RNA, 19 nt, Influenza A virus
gcuggcgcacuugccaguu

SEQ ID NO: 9196 - RNA, 19 nt, Influenza A virus
acuggugcgcuugccaguu

SEQ ID NO: 9197 - RNA, 19 nt, Influenza A virus
gcuggugcgcuugccagcu

SEQ ID NO: 9198 - RNA, 19 nt, Influenza A virus
accggugcacuugccaguu

SEQ ID NO: 9199 - RNA, 19 nt, Influenza A virus
cuucuacggaaggagugcc

SEQ ID NO: 9200 - RNA, 19 nt, Influenza A virus
cuucuacggaagggguacc

SEQ ID NO: 9201 - RNA, 19 nt, Influenza A virus
cuucuacggagggaguacc

SEQ ID NO: 9202 - RNA, 19 nt, Influenza A virus
cuucuacgggaggaguacc

SEQ ID NO: 9203 - RNA, 19 nt, Influenza A virus
cuuuuacggaaggaguacc

SEQ ID NO: 9204 - RNA, 19 nt, Influenza A virus
auucuacggaaggaguacc

SEQ ID NO: 9205 - RNA, 19 nt, Influenza A virus
cugcuacggaaggaguacc

SEQ ID NO: 9206 - RNA, 19 nt, Influenza A virus
cuuccacggaaggaguacc

SEQ ID NO: 9207 - RNA, 19 nt, Influenza A virus
cuucuacagaaggaguacc

SEQ ID NO: 9208 - RNA, 19 nt, Influenza A virus
cuucuacggaaggaauacc

SEQ ID NO: 9209 - RNA, 19 nt, Influenza A virus
cuucuacggaaggaguucc

SEQ ID NO: 9210 - RNA, 19 nt, Influenza A virus
cuuguacggaaggaguacc

SEQ ID NO: 9211 - RNA, 19 nt, Influenza A virus
cuccuacggaaggagugcu

SEQ ID NO: 9212 - RNA, 19 nt, Influenza A virus
cuucuacagauggaguacc

SEQ ID NO: 9213 - RNA, 19 nt, Influenza A virus
cugcuacggcagggguacc

SEQ ID NO: 9214 - RNA, 19 nt, Influenza A virus
ucuugaggcucucauggag

SEQ ID NO: 9215 - RNA, 19 nt, Influenza A virus
ucuugagguucucauggaa

SEQ ID NO: 9216 - RNA, 19 nt, Influenza A virus
ccuugaggcucucauggaa

SEQ ID NO: 9217 - RNA, 19 nt, Influenza A virus
ucuagaggcucucauggaa

SEQ ID NO: 9218 - RNA, 19 nt, Influenza A virus
ucucgaggcucucauggaa

SEQ ID NO: 9219 - RNA, 19 nt, Influenza A virus
ucuugaagcucucauggaa

SEQ ID NO: 9220 - RNA, 19 nt, Influenza A virus
ucuugaggcacucauggaa

SEQ ID NO: 9221 - RNA, 19 nt, Influenza A virus
ucuugaggcucuaauggaa

SEQ ID NO: 9222 - RNA, 19 nt, Influenza A virus
ucuugaggcucucacggaa

SEQ ID NO: 9223 - RNA, 19 nt, Influenza A virus
ccuugaggcucucauggag

SEQ ID NO: 9224 - RNA, 19 nt, Influenza A virus
ucucgaggcucucauggag

SEQ ID NO: 9225 - RNA, 19 nt, Influenza A virus
ucuugagguucucacggaa

SEQ ID NO: 9226 - RNA, 19 nt, Influenza A virus
cugcuggugcacuugcuag

SEQ ID NO: 9227 - RNA, 19 nt, Influenza A virus
cugcuggugcgcuugccag

SEQ ID NO: 9228 - RNA, 19 nt, Influenza A virus
ccgcuggugcacuugccag

SEQ ID NO: 9229 - RNA, 19 nt, Influenza A virus
cggcuggugcacuugccag

SEQ ID NO: 9230 - RNA, 19 nt, Influenza A virus
cugccggugcacuugccag

SEQ ID NO: 9231 - RNA, 19 nt, Influenza A virus
cugcuggcgcacuugccag

SEQ ID NO: 9232 - RNA, 19 nt, Influenza A virus
caacuggugcacuugccag

SEQ ID NO: 9233 - RNA, 19 nt, Influenza A virus
caacuggugcgcuugccag

SEQ ID NO: 9234 - RNA, 19 nt, Influenza A virus
ugcuggugcacuugcuagu

SEQ ID NO: 9235 - RNA, 19 nt, Influenza A virus
ugcuggugcgcuugccagu

SEQ ID NO: 9236 - RNA, 19 nt, Influenza A virus
cgcuggugcacuugccagu

SEQ ID NO: 9237 - RNA, 19 nt, Influenza A virus
ggcuggugcacuugccagu

SEQ ID NO: 9238 - RNA, 19 nt, Influenza A virus
ugccggugcacuugccagu

SEQ ID NO: 9239 - RNA, 19 nt, Influenza A virus
ugcuggcgcacuugccagu

SEQ ID NO: 9240 - RNA, 19 nt, Influenza A virus
ugcuggugcgcuugccagc

SEQ ID NO: 9241 - RNA, 19 nt, Influenza A virus
aacuggugcacuugccagu

SEQ ID NO: 9242 - RNA, 19 nt, Influenza A virus
aacuggugcgcuugccagu

SEQ ID NO: 9243 - RNA, 19 nt, Influenza A virus
ucugcuggugcacuugcua

SEQ ID NO: 9244 - RNA, 19 nt, Influenza A virus
ucugcuggugcgcuugcca

SEQ ID NO: 9245 - RNA, 19 nt, Influenza A virus
uccgcuggugcacuugcca

SEQ ID NO: 9246 - RNA, 19 nt, Influenza A virus
ucggcuggugcacuugcca

SEQ ID NO: 9247 - RNA, 19 nt, Influenza A virus
ucugccggugcacuugcca

SEQ ID NO: 9248 - RNA, 19 nt, Influenza A virus
ucugcuggcgcacuugcca

SEQ ID NO: 9249 - RNA, 19 nt, Influenza A virus
ucaacuggugcacuugcca

SEQ ID NO: 9250 - RNA, 19 nt, Influenza A virus
ucaacuggugcgcuugcca

SEQ ID NO: 9251 - RNA, 19 nt, Influenza A virus
ccauggggccaaagaagua

SEQ ID NO: 9252 - RNA, 19 nt, Influenza A virus
ccauggggccaaagagaua

SEQ ID NO: 9253 - RNA, 19 nt, Influenza A virus
ccauggggccaaaggaaua

SEQ ID NO: 9254 - RNA, 19 nt, Influenza A virus
ccauggggccaaggaaaua

SEQ ID NO: 9255 - RNA, 19 nt, Influenza A virus
ccauggggcuaaagaaaua

SEQ ID NO: 9256 - RNA, 19 nt, Influenza A virus
cuauggggccaaagaaaua

SEQ ID NO: 9257 - RNA, 19 nt, Influenza A virus
ucauggggccaaagaaaua

SEQ ID NO: 9258 - RNA, 19 nt, Influenza A virus
ccauggagccaaagaaaua

SEQ ID NO: 9259 - RNA, 19 nt, Influenza A virus
ccauggggccaaagaaauc

SEQ ID NO: 9260 - RNA, 19 nt, Influenza A virus
ccacggggccaaagaagua

SEQ ID NO: 9261 - RNA, 19 nt, Influenza A virus
cuauggggccaaagaaauc

SEQ ID NO: 9262 - RNA, 19 nt, Influenza A virus
ucauggggccaaaguaaua

SEQ ID NO: 9263 - RNA, 19 nt, Influenza A virus
agucuaugagggaagagua

SEQ ID NO: 9264 - RNA, 19 nt, Influenza A virus
agucuaugagggaggaaua

SEQ ID NO: 9265 - RNA, 19 nt, Influenza A virus
agucuaugggggaagaaua

SEQ ID NO: 9266 - RNA, 19 nt, Influenza A virus
aguuuaugagggaagaaua

SEQ ID NO: 9267 - RNA, 19 nt, Influenza A virus
aguccaugagggaagaaua

SEQ ID NO: 9268 - RNA, 19 nt, Influenza A virus
agucuaugagggaacaaua

SEQ ID NO: 9269 - RNA, 19 nt, Influenza A virus
agucuuugagggaagaaua

SEQ ID NO: 9270 - RNA, 19 nt, Influenza A virus
aguccaugagggaagagua

SEQ ID NO: 9271 - RNA, 19 nt, Influenza A virus
agucuacuagggaagaaua

SEQ ID NO: 9272 - RNA, 19 nt, Influenza A virus
ccuucuacggaaggagugc

SEQ ID NO: 9273 - RNA, 19 nt, Influenza A virus
ccuucuacggaagggguac

SEQ ID NO: 9274 - RNA, 19 nt, Influenza A virus
ccuucuacggagggaguac

SEQ ID NO: 9275 - RNA, 19 nt, Influenza A virus
ccuucuacgggaggaguac

SEQ ID NO: 9276 - RNA, 19 nt, Influenza A virus
ccuuuuacggaaggaguac

SEQ ID NO: 9277 - RNA, 19 nt, Influenza A virus
ucuucuacggaaggaguac

SEQ ID NO: 9278 - RNA, 19 nt, Influenza A virus
cauucuacggaaggaguac

SEQ ID NO: 9279 - RNA, 19 nt, Influenza A virus
ccugcuacggaaggaguac

SEQ ID NO: 9280 - RNA, 19 nt, Influenza A virus
ccuuccacggaaggaguac

SEQ ID NO: 9281 - RNA, 19 nt, Influenza A virus
ccuucuacagaaggaguac

SEQ ID NO: 9282 - RNA, 19 nt, Influenza A virus
ccuucuacggaaggaauac

SEQ ID NO: 9283 - RNA, 19 nt, Influenza A virus
ccuucuacggaaggaguuc

SEQ ID NO: 9284 - RNA, 19 nt, Influenza A virus
ccuuguacggaaggaguac

SEQ ID NO: 9285 - RNA, 19 nt, Influenza A virus
gcuucuacggaaggaguac

SEQ ID NO: 9286 - RNA, 19 nt, Influenza A virus
ccuccuacggaaggagugc

SEQ ID NO: 9287 - RNA, 19 nt, Influenza A virus
ccuucuacagauggaguac

SEQ ID NO: 9288 - RNA, 19 nt, Influenza A virus
ccugcuacggcagggguac

SEQ ID NO: 9289 - RNA, 19 nt, Influenza A virus
gucuaugagggaagaguau

SEQ ID NO: 9290 - RNA, 19 nt, Influenza A virus
gucuaugagggaggaauau

SEQ ID NO: 9291 - RNA, 19 nt, Influenza A virus
gucuaugggggaagaauau

SEQ ID NO: 9292 - RNA, 19 nt, Influenza A virus
guuuaugagggaagaauau

SEQ ID NO: 9293 - RNA, 19 nt, Influenza A virus
guccaugagggaagaauau

SEQ ID NO: 9294 - RNA, 19 nt, Influenza A virus
gucuaugagggaacaauau

SEQ ID NO: 9295 - RNA, 19 nt, Influenza A virus
gucuaugagggaagaauac

SEQ ID NO: 9296 - RNA, 19 nt, Influenza A virus
gucuuugagggaagaauau

SEQ ID NO: 9297 - RNA, 19 nt, Influenza A virus
guccaugagggaagaguau

SEQ ID NO: 9298 - RNA, 19 nt, Influenza A virus
gucuaugagggaagaguac

SEQ ID NO: 9299 - RNA, 19 nt, Influenza A virus
gucuacuagggaagaauau

SEQ ID NO: 9300 - RNA, 19 nt, Influenza A virus
cuaugagggaagaguaucg

SEQ ID NO: 9301 - RNA, 19 nt, Influenza A virus
cuaugagggaggaauaucg

SEQ ID NO: 9302 - RNA, 19 nt, Influenza A virus
cuaugggggaagaauaucg

SEQ ID NO: 9303 - RNA, 19 nt, Influenza A virus
ccaugagggaagaauaucg

SEQ ID NO: 9304 - RNA, 19 nt, Influenza A virus
cuaugagggaagaauaccg

SEQ ID NO: 9305 - RNA, 19 nt, Influenza A virus
cuuugagggaagaauaucg

SEQ ID NO: 9306 - RNA, 19 nt, Influenza A virus
cuaugagggaacaauauug

SEQ ID NO: 9307 - RNA, 19 nt, Influenza A virus
cuaugagggaagaguaccg

SEQ ID NO: 9308 - RNA, 19 nt, Influenza A virus
uuaugagggaagaauaugg

SEQ ID NO: 9309 - RNA, 19 nt, Influenza A virus
ccaugagggaagaauauca

SEQ ID NO: 9310 - RNA, 19 nt, Influenza A virus
cuacuagggaagaauaucg

SEQ ID NO: 9311 - RNA, 19 nt, Influenza A virus
ccaugagggaagaguauca

SEQ ID NO: 9312 - RNA, 19 nt, Influenza A virus
ucuaugagggaagaguauc

SEQ ID NO: 9313 - RNA, 19 nt, Influenza A virus
ucuaugagggaggaauauc

SEQ ID NO: 9314 - RNA, 19 nt, Influenza A virus
ucuaugggggaagaauauc

SEQ ID NO: 9315 - RNA, 19 nt, Influenza A virus
uccaugagggaagaauauc

SEQ ID NO: 9316 - RNA, 19 nt, Influenza A virus
ucuaugagggaagaauacc

SEQ ID NO: 9317 - RNA, 19 nt, Influenza A virus
ucuuugagggaagaauauc

SEQ ID NO: 9318 - RNA, 19 nt, Influenza A virus
uccaugagggaagaguauc

SEQ ID NO: 9319 - RNA, 19 nt, Influenza A virus
ucuaugagggaacaauauu

SEQ ID NO: 9320 - RNA, 19 nt, Influenza A virus
ucuaugagggaagaguacc

SEQ ID NO: 9321 - RNA, 19 nt, Influenza A virus
uuuaugagggaagaauaug

SEQ ID NO: 9322 - RNA, 19 nt, Influenza A virus
ucuacuagggaagaauauc

SEQ ID NO: 9323 - RNA, 19 nt, Influenza A virus
gucauuuugucagcauagg

SEQ ID NO: 9324 - RNA, 19 nt, Influenza A virus
gucauuuugucagcaugga

SEQ ID NO: 9325 - RNA, 19 nt, Influenza A virus
gucauuuugucaguauaga

SEQ ID NO: 9326 - RNA, 19 nt, Influenza A virus
gucguuuugucagcauaga

SEQ ID NO: 9327 - RNA, 19 nt, Influenza A virus
gucaauuugucagcauaga

SEQ ID NO: 9328 - RNA, 19 nt, Influenza A virus
gucauucugucagcauaga

SEQ ID NO: 9329 - RNA, 19 nt, Influenza A virus
gucauuuugccagcauaga

SEQ ID NO: 9330 - RNA, 19 nt, Influenza A virus
gucauuuugucaacauaga

SEQ ID NO: 9331 - RNA, 19 nt, Influenza A virus
gucauuuugucagcauaaa

SEQ ID NO: 9332 - RNA, 19 nt, Influenza A virus
gucauuuugucagcauaca

SEQ ID NO: 9333 - RNA, 19 nt, Influenza A virus
gucguuuugucaacauaga

SEQ ID NO: 9334 - RNA, 19 nt, Influenza A virus
gucauuucgucaacauaga

SEQ ID NO: 9335 - RNA, 19 nt, Influenza A virus
gucauuuugucaacauagu

SEQ ID NO: 9336 - RNA, 19 nt, Influenza A virus
gucauuuugucaucauaca

SEQ ID NO: 9337 - RNA, 19 nt, Influenza A virus
gagucuaugagggaagagu

SEQ ID NO: 9338 - RNA, 19 nt, Influenza A virus
gagucuaugagggaggaau

SEQ ID NO: 9339 - RNA, 19 nt, Influenza A virus
gagucuaugggggaagaau

SEQ ID NO: 9340 - RNA, 19 nt, Influenza A virus
gaguuuaugagggaagaau

SEQ ID NO: 9341 - RNA, 19 nt, Influenza A virus
aagucuaugagggaagaau

SEQ ID NO: 9342 - RNA, 19 nt, Influenza A virus
gaguccaugagggaagaau

SEQ ID NO: 9343 - RNA, 19 nt, Influenza A virus
gagucuaugagggaacaau

SEQ ID NO: 9344 - RNA, 19 nt, Influenza A virus
gagucuuugagggaagaau

SEQ ID NO: 9345 - RNA, 19 nt, Influenza A virus
gaguccaugagggaagagu

SEQ ID NO: 9346 - RNA, 19 nt, Influenza A virus
gagucuacuagggaagaau

SEQ ID NO: 9347 - RNA, 19 nt, Influenza A virus
ucauuuugucagcauaggg

SEQ ID NO: 9348 - RNA, 19 nt, Influenza A virus
ucauuuugucagcauggag

SEQ ID NO: 9349 - RNA, 19 nt, Influenza A virus
ucauuuugucaguauagag

SEQ ID NO: 9350 - RNA, 19 nt, Influenza A virus
ucguuuugucagcauagag

SEQ ID NO: 9351 - RNA, 19 nt, Influenza A virus
ucaauuugucagcauagag

SEQ ID NO: 9352 - RNA, 19 nt, Influenza A virus
ucauucugucagcauagag

SEQ ID NO: 9353 - RNA, 19 nt, Influenza A virus
ucauuuugccagcauagag

SEQ ID NO: 9354 - RNA, 19 nt, Influenza A virus
ucauuuugucaacauagag

SEQ ID NO: 9355 - RNA, 19 nt, Influenza A virus
ucauuuugucagcauaaag

SEQ ID NO: 9356 - RNA, 19 nt, Influenza A virus
ucauuuugucagcauacag

SEQ ID NO: 9357 - RNA, 19 nt, Influenza A virus
ucauuuugucagcauagau

SEQ ID NO: 9358 - RNA, 19 nt, Influenza A virus
gcauuuugucaacauagag

SEQ ID NO: 9359 - RNA, 19 nt, Influenza A virus
ucauuucgucaacauagag

SEQ ID NO: 9360 - RNA, 19 nt, Influenza A virus
ucauuuugucaacauagaa

SEQ ID NO: 9361 - RNA, 19 nt, Influenza A virus
ucauuuugucaacauagug

SEQ ID NO: 9362 - RNA, 19 nt, Influenza A virus
ucguuuugucaacauagaa

SEQ ID NO: 9363 - RNA, 19 nt, Influenza A virus
agacuugaagauguuuuug

SEQ ID NO: 9364 - RNA, 19 nt, Influenza A virus
agacuugaggaugucuuug

SEQ ID NO: 9365 - RNA, 19 nt, Influenza A virus
aggcuugaagaugucuuug

SEQ ID NO: 9366 - RNA, 19 nt, Influenza A virus
agacuugaggauguuuuug

SEQ ID NO: 9367 - RNA, 19 nt, Influenza A virus
aaacuugaagaugucuuug

SEQ ID NO: 9368 - RNA, 19 nt, Influenza A virus
agacuucaagaugucuuug

SEQ ID NO: 9369 - RNA, 19 nt, Influenza A virus
agacuugaaaaugucuuug

SEQ ID NO: 9370 - RNA, 19 nt, Influenza A virus
agacuugaagauguauuug

SEQ ID NO: 9371 - RNA, 19 nt, Influenza A virus
agacuugaauaugucuuug

SEQ ID NO: 9372 - RNA, 19 nt, Influenza A virus
aaacuugaggaugucuuug

SEQ ID NO: 9373 - RNA, 19 nt, Influenza A virus
agacuggaaggugucuuug

SEQ ID NO: 9374 - RNA, 19 nt, Influenza A virus
agacaagaagaugucuuug

SEQ ID NO: 9375 - RNA, 19 nt, Influenza A virus
agacucgaagacguuuuug

SEQ ID NO: 9376 - RNA, 19 nt, Influenza A virus
gacuugaagauguuuuugc

SEQ ID NO: 9377 - RNA, 19 nt, Influenza A virus
gacuugaggaugucuuugc

SEQ ID NO: 9378 - RNA, 19 nt, Influenza A virus
ggcuugaagaugucuuugc

SEQ ID NO: 9379 - RNA, 19 nt, Influenza A virus
gacuugaggauguuuuugc

SEQ ID NO: 9380 - RNA, 19 nt, Influenza A virus
aacuugaagaugucuuugc

SEQ ID NO: 9381 - RNA, 19 nt, Influenza A virus
gacuucaagaugucuuugc

SEQ ID NO: 9382 - RNA, 19 nt, Influenza A virus
gacuugaaaaugucuuugc

SEQ ID NO: 9383 - RNA, 19 nt, Influenza A virus
gacuugaagauguauuugc

SEQ ID NO: 9384 - RNA, 19 nt, Influenza A virus
gacuugaauaugucuuugc

SEQ ID NO: 9385 - RNA, 19 nt, Influenza A virus
aacuugaggaugucuuugc

SEQ ID NO: 9386 - RNA, 19 nt, Influenza A virus
gacuggaaggugucuuugc

SEQ ID NO: 9387 - RNA, 19 nt, Influenza A virus
gacaagaagaugucuuugc

SEQ ID NO: 9388 - RNA, 19 nt, Influenza A virus
gacucgaagacguuuuugc

SEQ ID NO: 9389 - RNA, 19 nt, Influenza A virus
agagacuugaagauguuuu

SEQ ID NO: 9390 - RNA, 19 nt, Influenza A virus
agagacuugaggaugucuu

SEQ ID NO: 9391 - RNA, 19 nt, Influenza A virus
agaggcuugaagaugucuu

SEQ ID NO: 9392 - RNA, 19 nt, Influenza A virus
agagacuugaggauguuuu

SEQ ID NO: 9393 - RNA, 19 nt, Influenza A virus
agaaacuugaagaugucuu

SEQ ID NO: 9394 - RNA, 19 nt, Influenza A virus
agagacuucaagaugucuu

SEQ ID NO: 9395 - RNA, 19 nt, Influenza A virus
agagacuugaaaaugucuu

SEQ ID NO: 9396 - RNA, 19 nt, Influenza A virus
agagacuugaagauguauu

SEQ ID NO: 9397 - RNA, 19 nt, Influenza A virus
agagacuugaauaugucuu

SEQ ID NO: 9398 - RNA, 19 nt, Influenza A virus
agaaacuugaggaugucuu

SEQ ID NO: 9399 - RNA, 19 nt, Influenza A virus
agagacuggaaggugucuu

SEQ ID NO: 9400 - RNA, 19 nt, Influenza A virus
agagacaagaagaugucuu

SEQ ID NO: 9401 - RNA, 19 nt, Influenza A virus
agagacucgaagacguuuu

SEQ ID NO: 9402 - RNA, 19 nt, Influenza A virus
gagacuugaagauguuuuu

SEQ ID NO: 9403 - RNA, 19 nt, Influenza A virus
gagacuugaggaugucuuu

SEQ ID NO: 9404 - RNA, 19 nt, Influenza A virus
gaggcuugaagaugucuuu

SEQ ID NO: 9405 - RNA, 19 nt, Influenza A virus
gagacuugaggauguuuuu

SEQ ID NO: 9406 - RNA, 19 nt, Influenza A virus
gaaacuugaagaugucuuu

SEQ ID NO: 9407 - RNA, 19 nt, Influenza A virus
gagacuucaagaugucuuu

SEQ ID NO: 9408 - RNA, 19 nt, Influenza A virus
gagacuugaaaaugucuuu

SEQ ID NO: 9409 - RNA, 19 nt, Influenza A virus
gagacuugaagauguauuu

SEQ ID NO: 9410 - RNA, 19 nt, Influenza A virus
gagacuugaauaugucuuu

SEQ ID NO: 9411 - RNA, 19 nt, Influenza A virus
gaaacuugaggaugucuuu

SEQ ID NO: 9412 - RNA, 19 nt, Influenza A virus
gagacuggaaggugucuuu

SEQ ID NO: 9413 - RNA, 19 nt, Influenza A virus
gagacaagaagaugucuuu

SEQ ID NO: 9414 - RNA, 19 nt, Influenza A virus
gagacucgaagacguuuuu

SEQ ID NO: 9415 - RNA, 19 nt, Influenza A virus
cagagacuugaagauguuu

SEQ ID NO: 9416 - RNA, 19 nt, Influenza A virus
cagagacuugaggaugucu

SEQ ID NO: 9417 - RNA, 19 nt, Influenza A virus
cagaggcuugaagaugucu

SEQ ID NO: 9418 - RNA, 19 nt, Influenza A virus
cagagacuugaggauguuu

SEQ ID NO: 9419 - RNA, 19 nt, Influenza A virus
cagaaacuugaagaugucu

SEQ ID NO: 9420 - RNA, 19 nt, Influenza A virus
cagagacuucaagaugucu

SEQ ID NO: 9421 - RNA, 19 nt, Influenza A virus
cagagacuugaaaaugucu

SEQ ID NO: 9422 - RNA, 19 nt, Influenza A virus
cagagacuugaagauguau

SEQ ID NO: 9423 - RNA, 19 nt, Influenza A virus
cagagacuugaauaugucu

SEQ ID NO: 9424 - RNA, 19 nt, Influenza A virus
cagaaacuugaggaugucu

SEQ ID NO: 9425 - RNA, 19 nt, Influenza A virus
cagagacuggaaggugucu

SEQ ID NO: 9426 - RNA, 19 nt, Influenza A virus
cagagacaagaagaugucu

SEQ ID NO: 9427 - RNA, 19 nt, Influenza A virus
cagagacucgaagacguuu

SEQ ID NO: 9428 - RNA, 19 nt, Influenza A virus
gugcagaugcaacgguuca

SEQ ID NO: 9429 - RNA, 19 nt, Influenza A virus
gugcagaugcagcgauuca

SEQ ID NO: 9430 - RNA, 19 nt, Influenza A virus
gugcaggugcaacgauuca

SEQ ID NO: 9431 - RNA, 19 nt, Influenza A virus
gugcagaugcagcgguuca

SEQ ID NO: 9432 - RNA, 19 nt, Influenza A virus
guacagaugcaacgauuca

SEQ ID NO: 9433 - RNA, 19 nt, Influenza A virus
gugcaaaugcaacgauuca

SEQ ID NO: 9434 - RNA, 19 nt, Influenza A virus
guacagaugcagcgauuca

SEQ ID NO: 9435 - RNA, 19 nt, Influenza A virus
gugcaaaugcagcgauuca

SEQ ID NO: 9436 - RNA, 19 nt, Influenza A virus
guacaaaugcagcgauuca

SEQ ID NO: 9437 - RNA, 19 nt, Influenza A virus
gugcaaaugcagagauuca

SEQ ID NO: 9438 - RNA, 19 nt, Influenza A virus
uucugcuggugcacuugcu

SEQ ID NO: 9439 - RNA, 19 nt, Influenza A virus
uucugcuggugcgcuugcc

SEQ ID NO: 9440 - RNA, 19 nt, Influenza A virus
cucugcuggugcacuugcc

SEQ ID NO: 9441 - RNA, 19 nt, Influenza A virus
uuccgcuggugcacuugcc

SEQ ID NO: 9442 - RNA, 19 nt, Influenza A virus
uucggcuggugcacuugcc

SEQ ID NO: 9443 - RNA, 19 nt, Influenza A virus
uucugccggugcacuugcc

SEQ ID NO: 9444 - RNA, 19 nt, Influenza A virus
uucugcuggcgcacuugcc

SEQ ID NO: 9445 - RNA, 19 nt, Influenza A virus
ugcagaugcaacgauucag

SEQ ID NO: 9446 - RNA, 19 nt, Influenza A virus
ugcagaugcaacgguucaa

SEQ ID NO: 9447 - RNA, 19 nt, Influenza A virus
ugcagaugcagcgauucaa

SEQ ID NO: 9448 - RNA, 19 nt, Influenza A virus
ugcaggugcaacgauucaa

SEQ ID NO: 9449 - RNA, 19 nt, Influenza A virus
ugcagaugcagcgguucaa

SEQ ID NO: 9450 - RNA, 19 nt, Influenza A virus
uacagaugcaacgauucaa

SEQ ID NO: 9451 - RNA, 19 nt, Influenza A virus
ugcaaaugcaacgauucaa

SEQ ID NO: 9452 - RNA, 19 nt, Influenza A virus
uacagaugcagcgauucaa

SEQ ID NO: 9453 - RNA, 19 nt, Influenza A virus
ugcaaaugcagcgauucaa

SEQ ID NO: 9454 - RNA, 19 nt, Influenza A virus
uacaaaugcagcgauucaa

SEQ ID NO: 9455 - RNA, 19 nt, Influenza A virus
ugcaaaugcagagauucaa

SEQ ID NO: 9456 - RNA, 19 nt, Influenza A virus
uaugagggaagaauaucgg

SEQ ID NO: 9457 - RNA, 19 nt, Influenza A virus
uaugagggaagaguaucga

SEQ ID NO: 9458 - RNA, 19 nt, Influenza A virus
uaugagggaggaauaucga

SEQ ID NO: 9459 - RNA, 19 nt, Influenza A virus
uaugggggaagaauaucga

SEQ ID NO: 9460 - RNA, 19 nt, Influenza A virus
uaugagggaagaguaucgg

SEQ ID NO: 9461 - RNA, 19 nt, Influenza A virus
caugagggaagaauaucga

SEQ ID NO: 9462 - RNA, 19 nt, Influenza A virus
uaugagggaagaauaccga

SEQ ID NO: 9463 - RNA, 19 nt, Influenza A virus
uaugagggaagaauaugga

SEQ ID NO: 9464 - RNA, 19 nt, Influenza A virus
uuugagggaagaauaucga

SEQ ID NO: 9465 - RNA, 19 nt, Influenza A virus
uuugagggaagaauaucgg

SEQ ID NO: 9466 - RNA, 19 nt, Influenza A virus
uaugagggaacaauauugg

SEQ ID NO: 9467 - RNA, 19 nt, Influenza A virus
uaugagggaagaguaccgg

SEQ ID NO: 9468 - RNA, 19 nt, Influenza A virus
caugagggaagaauaucaa

SEQ ID NO: 9469 - RNA, 19 nt, Influenza A virus
uacuagggaagaauaucga

SEQ ID NO: 9470 - RNA, 19 nt, Influenza A virus
caugagggaagaguaucaa

SEQ ID NO: 9471 - RNA, 19 nt, Influenza A virus
augggggugcagaugcagc

SEQ ID NO: 9472 - RNA, 19 nt, Influenza A virus
augggggugcaggugcaac

SEQ ID NO: 9473 - RNA, 19 nt, Influenza A virus
augggagugcagaugcaac

SEQ ID NO: 9474 - RNA, 19 nt, Influenza A virus
augggggugcaaaugcaac

SEQ ID NO: 9475 - RNA, 19 nt, Influenza A virus
augggagugcagaugcagc

SEQ ID NO: 9476 - RNA, 19 nt, Influenza A virus
augggaguacagaugcaac

SEQ ID NO: 9477 - RNA, 19 nt, Influenza A virus
augggagugcaaaugcaac

SEQ ID NO: 9478 - RNA, 19 nt, Influenza A virus
augggaguacagaugcagc

SEQ ID NO: 9479 - RNA, 19 nt, Influenza A virus
augggagugcaaaugcagc

SEQ ID NO: 9480 - RNA, 19 nt, Influenza A virus
ugggggugcagaugcagcg

SEQ ID NO: 9481 - RNA, 19 nt, Influenza A virus
ugggggugcaggugcaacg

SEQ ID NO: 9482 - RNA, 19 nt, Influenza A virus
ugggagugcagaugcaacg

SEQ ID NO: 9483 - RNA, 19 nt, Influenza A virus
ugggggugcaaaugcaacg

SEQ ID NO: 9484 - RNA, 19 nt, Influenza A virus
ugggagugcagaugcagcg

SEQ ID NO: 9485 - RNA, 19 nt, Influenza A virus
ugggaguacagaugcaacg

SEQ ID NO: 9486 - RNA, 19 nt, Influenza A virus
ugggagugcaaaugcaacg

SEQ ID NO: 9487 - RNA, 19 nt, Influenza A virus
ugggaguacagaugcagcg

SEQ ID NO: 9488 - RNA, 19 nt, Influenza A virus
ugggagugcaaaugcagcg

SEQ ID NO: 9489 - RNA, 19 nt, Influenza A virus
accucugacuagggggauu

SEQ ID NO: 9490 - RNA, 19 nt, Influenza A virus
accucuaacuaaggggauu

SEQ ID NO: 9491 - RNA, 19 nt, Influenza A virus
accucugacaaaggggauu

SEQ ID NO: 9492 - RNA, 19 nt, Influenza A virus
accucugaccaaggggauu

SEQ ID NO: 9493 - RNA, 19 nt, Influenza A virus
accucugacuaaagggauu

SEQ ID NO: 9494 - RNA, 19 nt, Influenza A virus
accucugacuaagggaauu

SEQ ID NO: 9495 - RNA, 19 nt, Influenza A virus
accucugacuaaggggauc

SEQ ID NO: 9496 - RNA, 19 nt, Influenza A virus
accucugacuaaggguauu

SEQ ID NO: 9497 - RNA, 19 nt, Influenza A virus
accucuuacuaaggggauu

SEQ ID NO: 9498 - RNA, 19 nt, Influenza A virus
accucuaacuaaggggauc

SEQ ID NO: 9499 - RNA, 19 nt, Influenza A virus
accucugaccaagggaauu

SEQ ID NO: 9500 - RNA, 19 nt, Influenza A virus
uggauuuuugaucgucuuu

SEQ ID NO: 9501 - RNA, 19 nt, Influenza A virus
uggauccuugaucgucuuu

SEQ ID NO: 9502 - RNA, 19 nt, Influenza A virus
uggauucuuaaucgucuuu

SEQ ID NO: 9503 - RNA, 19 nt, Influenza A virus
uggauucuugaucaucuuu

SEQ ID NO: 9504 - RNA, 19 nt, Influenza A virus
uggauucuugaucgccuuu

SEQ ID NO: 9505 - RNA, 19 nt, Influenza A virus
uggauuguugaucgucuuu

SEQ ID NO: 9506 - RNA, 19 nt, Influenza A virus
uggauuauugaucgccuuu

SEQ ID NO: 9507 - RNA, 19 nt, Influenza A virus
uggauuauugaucggcuuu

SEQ ID NO: 9508 - RNA, 19 nt, Influenza A virus
ggauuuuugaucgucuuuu

SEQ ID NO: 9509 - RNA, 19 nt, Influenza A virus
ggauccuugaucgucuuuu

SEQ ID NO: 9510 - RNA, 19 nt, Influenza A virus
ggauucuuaaucgucuuuu

SEQ ID NO: 9511 - RNA, 19 nt, Influenza A virus
ggauucuugaucaucuuuu

SEQ ID NO: 9512 - RNA, 19 nt, Influenza A virus
ggauucuugaucgccuuuu

SEQ ID NO: 9513 - RNA, 19 nt, Influenza A virus
ggauuguugaucgucuuuu

SEQ ID NO: 9514 - RNA, 19 nt, Influenza A virus
ggauuauugaucgccuuuu

SEQ ID NO: 9515 - RNA, 19 nt, Influenza A virus
ggauuauugaucggcuuuu

SEQ ID NO: 9516 - RNA, 19 nt, Influenza A virus
ggggugcagaugcaacggu

SEQ ID NO: 9517 - RNA, 19 nt, Influenza A virus
ggggugcagaugcagcgau

SEQ ID NO: 9518 - RNA, 19 nt, Influenza A virus
ggggugcaggugcaacgau

SEQ ID NO: 9519 - RNA, 19 nt, Influenza A virus
ggagugcagaugcaacgau

SEQ ID NO: 9520 - RNA, 19 nt, Influenza A virus
ggggugcaaaugcaacgau

SEQ ID NO: 9521 - RNA, 19 nt, Influenza A virus
ggagugcagaugcaacggu

SEQ ID NO: 9522 - RNA, 19 nt, Influenza A virus
ggagugcagaugcagcgau

SEQ ID NO: 9523 - RNA, 19 nt, Influenza A virus
ggagugcagaugcagcggu

SEQ ID NO: 9524 - RNA, 19 nt, Influenza A virus
ggaguacagaugcaacgau

SEQ ID NO: 9525 - RNA, 19 nt, Influenza A virus
ggagugcaaaugcaacgau

SEQ ID NO: 9526 - RNA, 19 nt, Influenza A virus
ggaguacagaugcagcgau

SEQ ID NO: 9527 - RNA, 19 nt, Influenza A virus
ggagugcaaaugcagcgau

SEQ ID NO: 9528 - RNA, 19 nt, Influenza A virus
gggugcagaugcaacgguu

SEQ ID NO: 9529 - RNA, 19 nt, Influenza A virus
gggugcagaugcagcgauu

SEQ ID NO: 9530 - RNA, 19 nt, Influenza A virus
gggugcaggugcaacgauu

SEQ ID NO: 9531 - RNA, 19 nt, Influenza A virus
gagugcagaugcaacgauu

SEQ ID NO: 9532 - RNA, 19 nt, Influenza A virus
gggugcaaaugcaacgauu

SEQ ID NO: 9533 - RNA, 19 nt, Influenza A virus
gagugcagaugcaacgguu

SEQ ID NO: 9534 - RNA, 19 nt, Influenza A virus
gagugcagaugcagcgauu

SEQ ID NO: 9535 - RNA, 19 nt, Influenza A virus
gagugcagaugcagcgguu

SEQ ID NO: 9536 - RNA, 19 nt, Influenza A virus
gaguacagaugcaacgauu

SEQ ID NO: 9537 - RNA, 19 nt, Influenza A virus
gagugcaaaugcaacgauu

SEQ ID NO: 9538 - RNA, 19 nt, Influenza A virus
gaguacagaugcagcgauu

SEQ ID NO: 9539 - RNA, 19 nt, Influenza A virus
gagugcaaaugcagcgauu

SEQ ID NO: 9540 - RNA, 19 nt, Influenza A virus
guggauuuuugaucgucuu

SEQ ID NO: 9541 - RNA, 19 nt, Influenza A virus
auggauucuugaucgucuu

SEQ ID NO: 9542 - RNA, 19 nt, Influenza A virus
guggauccuugaucgucuu

SEQ ID NO: 9543 - RNA, 19 nt, Influenza A virus
guggauucuuaaucgucuu

SEQ ID NO: 9544 - RNA, 19 nt, Influenza A virus
guggauucuugaucaucuu

SEQ ID NO: 9545 - RNA, 19 nt, Influenza A virus
guggauucuugaucgccuu

SEQ ID NO: 9546 - RNA, 19 nt, Influenza A virus
guggauuguugaucgucuu

SEQ ID NO: 9547 - RNA, 19 nt, Influenza A virus
guggauuauugaucgccuu

SEQ ID NO: 9548 - RNA, 19 nt, Influenza A virus
guggauuauugaucggcuu

SEQ ID NO: 9549 - RNA, 19 nt, Influenza A virus
ggugcagaugcaacgguuc

SEQ ID NO: 9550 - RNA, 19 nt, Influenza A virus
ggugcagaugcagcgauuc

SEQ ID NO: 9551 - RNA, 19 nt, Influenza A virus
ggugcaggugcaacgauuc

SEQ ID NO: 9552 - RNA, 19 nt, Influenza A virus
agugcagaugcaacgauuc

SEQ ID NO: 9553 - RNA, 19 nt, Influenza A virus
ggugcaaaugcaacgauuc

SEQ ID NO: 9554 - RNA, 19 nt, Influenza A virus
agugcagaugcaacgguuc

SEQ ID NO: 9555 - RNA, 19 nt, Influenza A virus
agugcagaugcagcgauuc

SEQ ID NO: 9556 - RNA, 19 nt, Influenza A virus
agugcagaugcagcgguuc

SEQ ID NO: 9557 - RNA, 19 nt, Influenza A virus
aguacagaugcaacgauuc

SEQ ID NO: 9558 - RNA, 19 nt, Influenza A virus
agugcaaaugcaacgauuc

SEQ ID NO: 9559 - RNA, 19 nt, Influenza A virus
aguacagaugcagcgauuc

SEQ ID NO: 9560 - RNA, 19 nt, Influenza A virus
agugcaaaugcagcgauuc

SEQ ID NO: 9561 - RNA, 19 nt, Influenza A virus
gggggugcagaugcaacgg

SEQ ID NO: 9562 - RNA, 19 nt, Influenza A virus
gggggugcagaugcagcga

SEQ ID NO: 9563 - RNA, 19 nt, Influenza A virus
gggggugcaggugcaacga

SEQ ID NO: 9564 - RNA, 19 nt, Influenza A virus
gggagugcagaugcaacga

SEQ ID NO: 9565 - RNA, 19 nt, Influenza A virus
gggggugcaaaugcaacga

SEQ ID NO: 9566 - RNA, 19 nt, Influenza A virus
gggagugcagaugcaacgg

SEQ ID NO: 9567 - RNA, 19 nt, Influenza A virus
gggagugcagaugcagcga

SEQ ID NO: 9568 - RNA, 19 nt, Influenza A virus
gggagugcagaugcagcgg

SEQ ID NO: 9569 - RNA, 19 nt, Influenza A virus
gggaguacagaugcaacga

SEQ ID NO: 9570 - RNA, 19 nt, Influenza A virus
gggagugcaaaugcaacga

SEQ ID NO: 9571 - RNA, 19 nt, Influenza A virus
gggaguacagaugcagcga

SEQ ID NO: 9572 - RNA, 19 nt, Influenza A virus
gggagugcaaaugcagcga

SEQ ID NO: 9573 - RNA, 19 nt, Influenza A virus
cucugacuagggggauuuu

SEQ ID NO: 9574 - RNA, 19 nt, Influenza A virus
cucuaacuaaggggauuuu

SEQ ID NO: 9575 - RNA, 19 nt, Influenza A virus
cucugacaaaggggauuuu

SEQ ID NO: 9576 - RNA, 19 nt, Influenza A virus
cucugaccaaggggauuuu

SEQ ID NO: 9577 - RNA, 19 nt, Influenza A virus
cucugacuaaagggauuuu

SEQ ID NO: 9578 - RNA, 19 nt, Influenza A virus
cucugacuaagggaauuuu

SEQ ID NO: 9579 - RNA, 19 nt, Influenza A virus
cucugacuaaggggaucuu

SEQ ID NO: 9580 - RNA, 19 nt, Influenza A virus
cucugacuaaggggauucu

SEQ ID NO: 9581 - RNA, 19 nt, Influenza A virus
cucugacuaaggguauuuu

SEQ ID NO: 9582 - RNA, 19 nt, Influenza A virus
cucuuacuaaggggauuuu

SEQ ID NO: 9583 - RNA, 19 nt, Influenza A virus
cucugaccaagggaauuuu

SEQ ID NO: 9584 - RNA, 19 nt, Influenza A virus
cucugacuaaggggauccu

SEQ ID NO: 9585 - RNA, 19 nt, Influenza A virus
ccucugacuagggggauuu

SEQ ID NO: 9586 - RNA, 19 nt, Influenza A virus
ccucuaacuaaggggauuu

SEQ ID NO: 9587 - RNA, 19 nt, Influenza A virus
ccucugacaaaggggauuu

SEQ ID NO: 9588 - RNA, 19 nt, Influenza A virus
ccucugaccaaggggauuu

SEQ ID NO: 9589 - RNA, 19 nt, Influenza A virus
ccucugacuaaagggauuu

SEQ ID NO: 9590 - RNA, 19 nt, Influenza A virus
ccucugacuaagggaauuu

SEQ ID NO: 9591 - RNA, 19 nt, Influenza A virus
ccucugacuaaggggaucu

SEQ ID NO: 9592 - RNA, 19 nt, Influenza A virus
ccucugacuaaggggauuc

SEQ ID NO: 9593 - RNA, 19 nt, Influenza A virus
ccucugacuaaggguauuu

SEQ ID NO: 9594 - RNA, 19 nt, Influenza A virus
ccucuuacuaaggggauuu

SEQ ID NO: 9595 - RNA, 19 nt, Influenza A virus
ccucugaccaagggaauuu

SEQ ID NO: 9596 - RNA, 19 nt, Influenza A virus
ccucugacuaaggggaucc

SEQ ID NO: 9597 - RNA, 19 nt, Influenza A virus
uguggauuuuugaucgucu

SEQ ID NO: 9598 - RNA, 19 nt, Influenza A virus
cguggauucuugaucgucu

SEQ ID NO: 9599 - RNA, 19 nt, Influenza A virus
uauggauucuugaucgucu

SEQ ID NO: 9600 - RNA, 19 nt, Influenza A virus
uguggauccuugaucgucu

SEQ ID NO: 9601 - RNA, 19 nt, Influenza A virus
uguggauucuuaaucgucu

SEQ ID NO: 9602 - RNA, 19 nt, Influenza A virus
uguggauucuugaucaucu

SEQ ID NO: 9603 - RNA, 19 nt, Influenza A virus
uguggauucuugaucgccu

SEQ ID NO: 9604 - RNA, 19 nt, Influenza A virus
uguggauuguugaucgucu

SEQ ID NO: 9605 - RNA, 19 nt, Influenza A virus
uguggauuauugaucgccu

SEQ ID NO: 9606 - RNA, 19 nt, Influenza A virus
uguggauuauugaucggcu

SEQ ID NO: 9607 - RNA, 19 nt, Influenza A virus
ucuuuuugaaaauuugcag

SEQ ID NO: 9608 - RNA, 19 nt, Influenza A virus
ccuucuugaaaauuugcag

SEQ ID NO: 9609 - RNA, 19 nt, Influenza A virus
ucuccuugaaaauuugcag

SEQ ID NO: 9610 - RNA, 19 nt, Influenza A virus
ucuuauugaaaauuugcag

SEQ ID NO: 9611 - RNA, 19 nt, Influenza A virus
ucuucucgaaaauuugcag

SEQ ID NO: 9612 - RNA, 19 nt, Influenza A virus
ucuucuugaaaaauugcag

SEQ ID NO: 9613 - RNA, 19 nt, Influenza A virus
ucuucuugaaaacuugcag

SEQ ID NO: 9614 - RNA, 19 nt, Influenza A virus
ucuucuugaaaauuuacag

SEQ ID NO: 9615 - RNA, 19 nt, Influenza A virus
ucucauugaaaauuugcag

SEQ ID NO: 9616 - RNA, 19 nt, Influenza A virus
ucuccuugauaauuugcag

SEQ ID NO: 9617 - RNA, 19 nt, Influenza A virus
auggcuaaagacaagaccg

SEQ ID NO: 9618 - RNA, 19 nt, Influenza A virus
auggcuaaagacaaggcca

SEQ ID NO: 9619 - RNA, 19 nt, Influenza A virus
auggcugaagacaagacca

SEQ ID NO: 9620 - RNA, 19 nt, Influenza A virus
guggcuaaagacaagacca

SEQ ID NO: 9621 - RNA, 19 nt, Influenza A virus
augguuaaagacaagaccg

SEQ ID NO: 9622 - RNA, 19 nt, Influenza A virus
guggcuaaagacaagaccg

SEQ ID NO: 9623 - RNA, 19 nt, Influenza A virus
auggcuaaagacaaaacca

SEQ ID NO: 9624 - RNA, 19 nt, Influenza A virus
auggcuaaagacaagaccc

SEQ ID NO: 9625 - RNA, 19 nt, Influenza A virus
auggcuaaagacaagaccu

SEQ ID NO: 9626 - RNA, 19 nt, Influenza A virus
auggcuaaagacuagaccu

SEQ ID NO: 9627 - RNA, 19 nt, Influenza A virus
aucuuuuugaaaauuugca

SEQ ID NO: 9628 - RNA, 19 nt, Influenza A virus
accuucuugaaaauuugca

SEQ ID NO: 9629 - RNA, 19 nt, Influenza A virus
aucuccuugaaaauuugca

SEQ ID NO: 9630 - RNA, 19 nt, Influenza A virus
aucuuauugaaaauuugca

SEQ ID NO: 9631 - RNA, 19 nt, Influenza A virus
aucuucucgaaaauuugca

SEQ ID NO: 9632 - RNA, 19 nt, Influenza A virus
aucuucuugaaaaauugca

SEQ ID NO: 9633 - RNA, 19 nt, Influenza A virus
aucuucuugaaaacuugca

SEQ ID NO: 9634 - RNA, 19 nt, Influenza A virus
aucuucuugaaaauuuaca

SEQ ID NO: 9635 - RNA, 19 nt, Influenza A virus
aucucauugaaaauuugca

SEQ ID NO: 9636 - RNA, 19 nt, Influenza A virus
aucuccuugauaauuugca

SEQ ID NO: 9637 - RNA, 19 nt, Influenza A virus
gaaugggggugcaggugca

SEQ ID NO: 9638 - RNA, 19 nt, Influenza A virus
ggaugggggugcagaugca

SEQ ID NO: 9639 - RNA, 19 nt, Influenza A virus
gaaugggagugcagaugca

SEQ ID NO: 9640 - RNA, 19 nt, Influenza A virus
gaaugggggugcaaaugca

SEQ ID NO: 9641 - RNA, 19 nt, Influenza A virus
ggaugggagugcagaugca

SEQ ID NO: 9642 - RNA, 19 nt, Influenza A virus
gaaugggaguacagaugca

SEQ ID NO: 9643 - RNA, 19 nt, Influenza A virus
ggaugggagugcaaaugca

SEQ ID NO: 9644 - RNA, 19 nt, Influenza A virus
cgaaugggggugcaggugc

SEQ ID NO: 9645 - RNA, 19 nt, Influenza A virus
cggaugggggugcagaugc

SEQ ID NO: 9646 - RNA, 19 nt, Influenza A virus
agaaugggggugcagaugc

SEQ ID NO: 9647 - RNA, 19 nt, Influenza A virus
cgaaugggagugcagaugc

SEQ ID NO: 9648 - RNA, 19 nt, Influenza A virus
cgaaugggggugcaaaugc

SEQ ID NO: 9649 - RNA, 19 nt, Influenza A virus
cggaugggagugcagaugc

SEQ ID NO: 9650 - RNA, 19 nt, Influenza A virus
cgaaugggaguacagaugc

SEQ ID NO: 9651 - RNA, 19 nt, Influenza A virus
cggaugggagugcaaaugc

SEQ ID NO: 9652 - RNA, 19 nt, Influenza A virus
aaugggggugcagaugcag

SEQ ID NO: 9653 - RNA, 19 nt, Influenza A virus
aaugggggugcaggugcaa

SEQ ID NO: 9654 - RNA, 19 nt, Influenza A virus
gaugggggugcagaugcaa

SEQ ID NO: 9655 - RNA, 19 nt, Influenza A virus
gaugggggugcagaugcag

SEQ ID NO: 9656 - RNA, 19 nt, Influenza A virus
aaugggagugcagaugcaa

SEQ ID NO: 9657 - RNA, 19 nt, Influenza A virus
aaugggggugcaaaugcaa

SEQ ID NO: 9658 - RNA, 19 nt, Influenza A virus
aaugggagugcagaugcag

SEQ ID NO: 9659 - RNA, 19 nt, Influenza A virus
gaugggagugcagaugcag

SEQ ID NO: 9660 - RNA, 19 nt, Influenza A virus
aaugggaguacagaugcaa

SEQ ID NO: 9661 - RNA, 19 nt, Influenza A virus
aaugggaguacagaugcag

SEQ ID NO: 9662 - RNA, 19 nt, Influenza A virus
gaugggagugcaaaugcaa

SEQ ID NO: 9663 - RNA, 19 nt, Influenza A virus
guaacacgguucgagucuc

SEQ ID NO: 9664 - RNA, 19 nt, Influenza A virus
auaacacagcucgagucuc

SEQ ID NO: 9665 - RNA, 19 nt, Influenza A virus
auaacacaguuagagucuc

SEQ ID NO: 9666 - RNA, 19 nt, Influenza A virus
auaacacaguucaagucuc

SEQ ID NO: 9667 - RNA, 19 nt, Influenza A virus
auaacacaguucgagucac

SEQ ID NO: 9668 - RNA, 19 nt, Influenza A virus
auaacacuguucgagucuc

SEQ ID NO: 9669 - RNA, 19 nt, Influenza A virus
  modified_base (5)..(5): a, c, g, u, unknown or other
auaanacaguucgagucuc

SEQ ID NO: 9670 - RNA, 19 nt, Influenza A virus
auaacacaguucaagucac

SEQ ID NO: 9671 - RNA, 19 nt, Influenza A virus
uaacacgguucgagucucu

SEQ ID NO: 9672 - RNA, 19 nt, Influenza A virus
uaacacagcucgagucucu

SEQ ID NO: 9673 - RNA, 19 nt, Influenza A virus
uaacacaguuagagucucu

SEQ ID NO: 9674 - RNA, 19 nt, Influenza A virus
uaacacaguucaagucucu

SEQ ID NO: 9675 - RNA, 19 nt, Influenza A virus
uaacacaguucgagucacu

SEQ ID NO: 9676 - RNA, 19 nt, Influenza A virus
uaacacuguucgagucucu

SEQ ID NO: 9677 - RNA, 19 nt, Influenza A virus
  modified_base (4)..(4): a, c, g, u, unknown or other
uaanacaguucgagucucu

SEQ ID NO: 9678 - RNA, 19 nt, Influenza A virus
uaacacaguucaagucacu

SEQ ID NO: 9679 - RNA, 19 nt, Influenza A virus
ugaauggagugauaacaca

SEQ ID NO: 9680 - RNA, 19 nt, Influenza A virus
ugaguggaaugauaacaca

SEQ ID NO: 9681 - RNA, 19 nt, Influenza A virus
ugaauggaaugguaacacg

SEQ ID NO: 9682 - RNA, 19 nt, Influenza A virus
ugaauggaauaauaacaca

SEQ ID NO: 9683 - RNA, 19 nt, Influenza A virus
  modified_base (16)..(16): a, c, g, u, unknown or other
ugaauggaaugauaanaca

SEQ ID NO: 9684 - RNA, 19 nt, Influenza A virus
ugaauggagugauaacacu

SEQ ID NO: 9685 - RNA, 19 nt, Influenza A virus
gaauggagugauaacacag

SEQ ID NO: 9686 - RNA, 19 nt, Influenza A virus
gaguggaaugauaacacag

SEQ ID NO: 9687 - RNA, 19 nt, Influenza A virus
gaauggaaugguaacacgg

SEQ ID NO: 9688 - RNA, 19 nt, Influenza A virus
gaauggaauaauaacacag

SEQ ID NO: 9689 - RNA, 19 nt, Influenza A virus
  modified_base (15)..(15): a, c, g, u, unknown or other
gaauggaaugauaanacag

SEQ ID NO: 9690 - RNA, 19 nt, Influenza A virus
gaauggagugauaacacug

SEQ ID NO: 9691 - RNA, 19 nt, Influenza A virus
uggagugauaacacaguuc

SEQ ID NO: 9692 - RNA, 19 nt, Influenza A virus
uggaaugguaacacgguuc

SEQ ID NO: 9693 - RNA, 19 nt, Influenza A virus
uggaauaauaacacaguuc

SEQ ID NO: 9694 - RNA, 19 nt, Influenza A virus
uggaaugauaacacagcuc

SEQ ID NO: 9695 - RNA, 19 nt, Influenza A virus
uggaaugauaacacaguua

SEQ ID NO: 9696 - RNA, 19 nt, Influenza A virus
  modified_base (12)..(12): a, c, g, u, unknown or other
uggaaugauaanacaguuc

SEQ ID NO: 9697 - RNA, 19 nt, Influenza A virus
uggagugauaacacuguuc

SEQ ID NO: 9698 - RNA, 19 nt, Influenza A virus
auggagugauaacacaguu

SEQ ID NO: 9699 - RNA, 19 nt, Influenza A virus
guggaaugauaacacaguu

SEQ ID NO: 9700 - RNA, 19 nt, Influenza A virus
auggaaugguaacacgguu

SEQ ID NO: 9701 - RNA, 19 nt, Influenza A virus
auggaauaauaacacaguu

SEQ ID NO: 9702 - RNA, 19 nt, Influenza A virus
auggaaugauaacacagcu

SEQ ID NO: 9703 - RNA, 19 nt, Influenza A virus
  modified_base (13)..(13): a, c, g, u, unknown or other
auggaaugauaanacaguu

SEQ ID NO: 9704 - RNA, 19 nt, Influenza A virus
auggagugauaacacuguu

SEQ ID NO: 9705 - RNA, 19 nt, Influenza A virus
aauggagugauaacacagu

SEQ ID NO: 9706 - RNA, 19 nt, Influenza A virus
aguggaaugauaacacagu

SEQ ID NO: 9707 - RNA, 19 nt, Influenza A virus
aauggaaugguaacacggu

SEQ ID NO: 9708 - RNA, 19 nt, Influenza A virus
aauggaauaauaacacagu

SEQ ID NO: 9709 - RNA, 19 nt, Influenza A virus
aauggaaugauaacacagc

SEQ ID NO: 9710 - RNA, 19 nt, Influenza A virus
  modified_base (14)..(14): a, c, g, u, unknown or other
aauggaaugauaanacagu

SEQ ID NO: 9711 - RNA, 19 nt, Influenza A virus
aauggagugauaacacugu

SEQ ID NO: 9712 - RNA, 19 nt, Influenza A virus
uugaauggaaugguaacac

SEQ ID NO: 9713 - RNA, 19 nt, Influenza A virus
uugaauggagugauaacac

SEQ ID NO: 9714 - RNA, 19 nt, Influenza A virus
uugaguggaaugauaacac

SEQ ID NO: 9715 - RNA, 19 nt, Influenza A virus
  modified_base (1)..(1): a, c, g, u, unknown or other
nugaauggaaugauaacac

SEQ ID NO: 9716 - RNA, 19 nt, Influenza A virus
uugaauggaauaauaacac

SEQ ID NO: 9717 - RNA, 19 nt, Influenza A virus
  modified_base (17)..(17): a, c, g, u, unknown or other
uugaauggaaugauaanac

SEQ ID NO: 9718 - RNA, 19 nt, Influenza A virus
ugguaacacgguucgaguc

SEQ ID NO: 9719 - RNA, 19 nt, Influenza A virus
uaauaacacaguucgaguc

SEQ ID NO: 9720 - RNA, 19 nt, Influenza A virus
ugauaacacagcucgaguc

SEQ ID NO: 9721 - RNA, 19 nt, Influenza A virus
ugauaacacaguuagaguc

SEQ ID NO: 9722 - RNA, 19 nt, Influenza A virus
ugauaacacaguucaaguc

SEQ ID NO: 9723 - RNA, 19 nt, Influenza A virus
ugauaacacuguucgaguc

SEQ ID NO: 9724 - RNA, 19 nt, Influenza A virus
  modified_base (7)..(7): a, c, g, u, unknown or other
ugauaanacaguucgaguc

SEQ ID NO: 9725 - RNA, 19 nt, Influenza A virus
gugauaacacaguucgagu

SEQ ID NO: 9726 - RNA, 19 nt, Influenza A virus
augguaacacgguucgagu

SEQ ID NO: 9727 - RNA, 19 nt, Influenza A virus
auaauaacacaguucgagu

SEQ ID NO: 9728 - RNA, 19 nt, Influenza A virus
augauaacacagcucgagu

SEQ ID NO: 9729 - RNA, 19 nt, Influenza A virus
augauaacacaguuagagu

SEQ ID NO: 9730 - RNA, 19 nt, Influenza A virus
augauaacacaguucaagu

SEQ ID NO: 9731 - RNA, 19 nt, Influenza A virus
  modified_base (8)..(8): a, c, g, u, unknown or other
augauaanacaguucgagu

SEQ ID NO: 9732 - RNA, 19 nt, Influenza A virus
gugauaacacuguucgagu

SEQ ID NO: 9733 - RNA, 19 nt, Influenza A virus
ggagugauaacacaguucg

SEQ ID NO: 9734 - RNA, 19 nt, Influenza A virus
ggaaugguaacacgguucg

SEQ ID NO: 9735 - RNA, 19 nt, Influenza A virus
ggaauaauaacacaguucg

SEQ ID NO: 9736 - RNA, 19 nt, Influenza A virus
ggaaugauaacacagcucg

SEQ ID NO: 9737 - RNA, 19 nt, Influenza A virus
ggaaugauaacacaguuag

SEQ ID NO: 9738 - RNA, 19 nt, Influenza A virus
ggaaugauaacacaguuca

SEQ ID NO: 9739 - RNA, 19 nt, Influenza A virus
  modified_base (11)..(11): a, c, g, u, unknown or other
ggaaugauaanacaguucg

SEQ ID NO: 9740 - RNA, 19 nt, Influenza A virus
ggagugauaacacuguucg

SEQ ID NO: 9741 - RNA, 19 nt, Influenza A virus
gagugauaacacaguucga

SEQ ID NO: 9742 - RNA, 19 nt, Influenza A virus
gaaugguaacacgguucga

SEQ ID NO: 9743 - RNA, 19 nt, Influenza A virus
gaauaauaacacaguucga

SEQ ID NO: 9744 - RNA, 19 nt, Influenza A virus
gaaugauaacacagcucga

SEQ ID NO: 9745 - RNA, 19 nt, Influenza A virus
gaaugauaacacaguuaga

SEQ ID NO: 9746 - RNA, 19 nt, Influenza A virus
gaaugauaacacaguucaa

SEQ ID NO: 9747 - RNA, 19 nt, Influenza A virus
  modified_base (10)..(10): a, c, g, u, unknown or other
gaaugauaanacaguucga

SEQ ID NO: 9748 - RNA, 19 nt, Influenza A virus
gagugauaacacuguucga

SEQ ID NO: 9749 - RNA, 19 nt, Influenza A virus
agugauaacacaguucgag

SEQ ID NO: 9750 - RNA, 19 nt, Influenza A virus
aaugguaacacgguucgag

SEQ ID NO: 9751 - RNA, 19 nt, Influenza A virus
aauaauaacacaguucgag

SEQ ID NO: 9752 - RNA, 19 nt, Influenza A virus
aaugauaacacagcucgag

SEQ ID NO: 9753 - RNA, 19 nt, Influenza A virus
aaugauaacacaguuagag

SEQ ID NO: 9754 - RNA, 19 nt, Influenza A virus
aaugauaacacaguucaag

SEQ ID NO: 9755 - RNA, 19 nt, Influenza A virus
  modified_base (9)..(9): a, c, g, u, unknown or other
aaugauaanacaguucgag

SEQ ID NO: 9756 - RNA, 19 nt, Influenza A virus
agugauaacacuguucgag

SEQ ID NO: 9757 - RNA, 19 nt, Influenza A virus
cuugaauggaaugguaaca

SEQ ID NO: 9758 - RNA, 19 nt, Influenza A virus
cuugaauggagugauaaca

SEQ ID NO: 9759 - RNA, 19 nt, Influenza A virus
cuugaguggaaugauaaca

SEQ ID NO: 9760 - RNA, 19 nt, Influenza A virus
uuugaauggaaugauaaca

SEQ ID NO: 9761 - RNA, 19 nt, Influenza A virus
cuugaauggaauaauaaca

SEQ ID NO: 9762 - RNA, 19 nt, Influenza A virus
  modified_base (18)..(18): a, c, g, u, unknown or other
cuugaauggaaugauaana

SEQ ID NO: 9763 - RNA, 19 nt, Influenza A virus
  modified_base (1)..(2): a, c, g, u, unknown or other
nnugaauggaaugauaaca

SEQ ID NO: 9764 - RNA, 19 nt, Influenza A virus
gguaacacgguucgagucu

SEQ ID NO: 9765 - RNA, 19 nt, Influenza A virus
aauaacacaguucgagucu

SEQ ID NO: 9766 - RNA, 19 nt, Influenza A virus
gauaacacagcucgagucu

SEQ ID NO: 9767 - RNA, 19 nt, Influenza A virus
gauaacacaguuagagucu

SEQ ID NO: 9768 - RNA, 19 nt, Influenza A virus
gauaacacaguucaagucu

SEQ ID NO: 9769 - RNA, 19 nt, Influenza A virus
gauaacacaguucgaguca

SEQ ID NO: 9770 - RNA, 19 nt, Influenza A virus
gauaacacuguucgagucu

SEQ ID NO: 9771 - RNA, 19 nt, Influenza A virus
  modified_base (6)..(6): a, c, g, u, unknown or other
gauaanacaguucgagucu

SEQ ID NO: 9772 - RNA, 19 nt, Influenza A virus
gauaacacaguucaaguca

SEQ ID NO: 9773 - RNA, 19 nt, Influenza A virus
augucaaaaaugcaguugg

SEQ ID NO: 9774 - RNA, 19 nt, Influenza A virus
augucaaaaaugcgauugg

SEQ ID NO: 9775 - RNA, 19 nt, Influenza A virus
augucaaagaugcaauugg

SEQ ID NO: 9776 - RNA, 19 nt, Influenza A virus
augucaaaaaugcaauuag

SEQ ID NO: 9777 - RNA, 19 nt, Influenza A virus
augucaaaauugcaauugg

SEQ ID NO: 9778 - RNA, 19 nt, Influenza A virus
ggaugucaaaaaugcaguu

SEQ ID NO: 9779 - RNA, 19 nt, Influenza A virus
ggaugucaaaaaugcgauu

SEQ ID NO: 9780 - RNA, 19 nt, Influenza A virus
ggaugucaaagaugcaauu

SEQ ID NO: 9781 - RNA, 19 nt, Influenza A virus
gaaugucaaaaaugcaauu

SEQ ID NO: 9782 - RNA, 19 nt, Influenza A virus
ggaugucaaaauugcaauu

SEQ ID NO: 9783 - RNA, 19 nt, Influenza A virus
aggaugucaaaaaugcagu

SEQ ID NO: 9784 - RNA, 19 nt, Influenza A virus
aggaugucaaaaaugcgau

SEQ ID NO: 9785 - RNA, 19 nt, Influenza A virus
aggaugucaaagaugcaau

SEQ ID NO: 9786 - RNA, 19 nt, Influenza A virus
agaaugucaaaaaugcaau

SEQ ID NO: 9787 - RNA, 19 nt, Influenza A virus
aggaugucaaaauugcaau

SEQ ID NO: 9788 - RNA, 19 nt, Influenza A virus
gaggaugucaaaaaugcag

SEQ ID NO: 9789 - RNA, 19 nt, Influenza A virus
gaggaugucaaaaaugcga

SEQ ID NO: 9790 - RNA, 19 nt, Influenza A virus
gaggaugucaaagaugcaa

SEQ ID NO: 9791 - RNA, 19 nt, Influenza A virus
aaggaugucaaaaaugcaa

SEQ ID NO: 9792 - RNA, 19 nt, Influenza A virus
gagaaugucaaaaaugcaa

SEQ ID NO: 9793 - RNA, 19 nt, Influenza A virus
gaggaugucaaaauugcaa

SEQ ID NO: 9794 - RNA, 19 nt, Influenza A virus
gaugucaaaaaugcaguug

SEQ ID NO: 9795 - RNA, 19 nt, Influenza A virus
gaugucaaaaaugcgauug

SEQ ID NO: 9796 - RNA, 19 nt, Influenza A virus
gaugucaaagaugcaauug

SEQ ID NO: 9797 - RNA, 19 nt, Influenza A virus
aaugucaaaaaugcaauug

SEQ ID NO: 9798 - RNA, 19 nt, Influenza A virus
gaugucaaaaaugcaauua

SEQ ID NO: 9799 - RNA, 19 nt, Influenza A virus
gaugucaaaauugcaauug

SEQ ID NO: 9800 - RNA, 19 nt, Influenza A virus
ugaggaugucaaaaaugcg

SEQ ID NO: 9801 - RNA, 19 nt, Influenza A virus
ugaggaugucaaagaugca

SEQ ID NO: 9802 - RNA, 19 nt, Influenza A virus
agaggaugucaaaaaugca

SEQ ID NO: 9803 - RNA, 19 nt, Influenza A virus
cgaggaugucaaaaaugca

SEQ ID NO: 9804 - RNA, 19 nt, Influenza A virus
uaaggaugucaaaaaugca

SEQ ID NO: 9805 - RNA, 19 nt, Influenza A virus
ugagaaugucaaaaaugca

SEQ ID NO: 9806 - RNA, 19 nt, Influenza A virus
ugaggaugucaaaauugca

SEQ ID NO: 9807 - RNA, 19 nt, Influenza A virus
cggcuucgccgggaucaga

SEQ ID NO: 9808 - RNA, 19 nt, Influenza A virus
aggcuucgccgagaucaga

SEQ ID NO: 9809 - RNA, 19 nt, Influenza A virus
cgacuucgccgagaucaga

SEQ ID NO: 9810 - RNA, 19 nt, Influenza A virus
cggauucgccgagaucaga

SEQ ID NO: 9811 - RNA, 19 nt, Influenza A virus
cggcuccgccgagaucaga

SEQ ID NO: 9812 - RNA, 19 nt, Influenza A virus
cggcuucaccgagaucaga

SEQ ID NO: 9813 - RNA, 19 nt, Influenza A virus
cggcuucgcagagaucaga

SEQ ID NO: 9814 - RNA, 19 nt, Influenza A virus
cggcuucgccgagaccaga

SEQ ID NO: 9815 - RNA, 19 nt, Influenza A virus
cggcuucgccgagauaaga

SEQ ID NO: 9816 - RNA, 19 nt, Influenza A virus
cggcuucgccgagaucaaa

SEQ ID NO: 9817 - RNA, 19 nt, Influenza A virus
cggcuucgccgauaucaga

SEQ ID NO: 9818 - RNA, 19 nt, Influenza A virus
cggguuugccgagaucaga

SEQ ID NO: 9819 - RNA, 19 nt, Influenza A virus
agacuucgccgagaucaga

SEQ ID NO: 9820 - RNA, 19 nt, Influenza A virus
cgacuucgcagagaucaga

SEQ ID NO: 9821 - RNA, 19 nt, Influenza A virus
cggcuccgccgagaucaaa

SEQ ID NO: 9822 - RNA, 19 nt, Influenza A virus
  modified_base (13)..(14): a, c, g, u, unknown or other
cggcuucgccgannucaga

SEQ ID NO: 9823 - RNA, 19 nt, Influenza A virus
ugucaaaaaugcaguuggg

SEQ ID NO: 9824 - RNA, 19 nt, Influenza A virus
ugucaaaaaugcgauuggg

SEQ ID NO: 9825 - RNA, 19 nt, Influenza A virus
ugucaaagaugcaauuggg

SEQ ID NO: 9826 - RNA, 19 nt, Influenza A virus
ugucaaaaaugcaauuagg

SEQ ID NO: 9827 - RNA, 19 nt, Influenza A virus
ugucaaaaaugcaauugga

SEQ ID NO: 9828 - RNA, 19 nt, Influenza A virus
ugucaaaaaugcaauuggc

SEQ ID NO: 9829 - RNA, 19 nt, Influenza A virus
ugucaaaauugcaauuggg

SEQ ID NO: 9830 - RNA, 19 nt, Influenza A virus
ugucaaaaaugcaguugga

SEQ ID NO: 9831 - RNA, 19 nt, Influenza A virus
ucuacagagauuugcuugg

SEQ ID NO: 9832 - RNA, 19 nt, Influenza A virus
uauacagagauucgcuugg

SEQ ID NO: 9833 - RNA, 19 nt, Influenza A virus
ucuacagaaauucgcuugg

SEQ ID NO: 9834 - RNA, 19 nt, Influenza A virus
ucuacagagauucacuugg

SEQ ID NO: 9835 - RNA, 19 nt, Influenza A virus
ucuacagagauucgcuuga

SEQ ID NO: 9836 - RNA, 19 nt, Influenza A virus
  modified_base (18)..(18): a, c, g, u, unknown or other
ucuacagagauucgcuung

SEQ ID NO: 9837 - RNA, 19 nt, Influenza A virus
ucuacagagauucucuugg

SEQ ID NO: 9838 - RNA, 19 nt, Influenza A virus
gcaauugggguccucgucg

SEQ ID NO: 9839 - RNA, 19 nt, Influenza A virus
gcaauugggguucucaucg

SEQ ID NO: 9840 - RNA, 19 nt, Influenza A virus
gcaguugggguccucaucg

SEQ ID NO: 9841 - RNA, 19 nt, Influenza A virus
gcgauugggguccucaucg

SEQ ID NO: 9842 - RNA, 19 nt, Influenza A virus
gcaauuaggguccucaucg

SEQ ID NO: 9843 - RNA, 19 nt, Influenza A virus
gcaauuggaguccucaucg

SEQ ID NO: 9844 - RNA, 19 nt, Influenza A virus
gcaauuggcguccucaucg

SEQ ID NO: 9845 - RNA, 19 nt, Influenza A virus
gcaauugggauccucaucg

SEQ ID NO: 9846 - RNA, 19 nt, Influenza A virus
gcaauugggcuccucaucg

SEQ ID NO: 9847 - RNA, 19 nt, Influenza A virus
gcaguuggaguccucaucg

SEQ ID NO: 9848 - RNA, 19 nt, Influenza A virus
gcaauugggauccucauca

SEQ ID NO: 9849 - RNA, 19 nt, Influenza A virus
caauugggguccucgucgg

SEQ ID NO: 9850 - RNA, 19 nt, Influenza A virus
caauugggguucucaucgg

SEQ ID NO: 9851 - RNA, 19 nt, Influenza A virus
caguugggguccucaucgg

SEQ ID NO: 9852 - RNA, 19 nt, Influenza A virus
cgauugggguccucaucgg

SEQ ID NO: 9853 - RNA, 19 nt, Influenza A virus
caauuaggguccucaucgg

SEQ ID NO: 9854 - RNA, 19 nt, Influenza A virus
caauuggaguccucaucgg

SEQ ID NO: 9855 - RNA, 19 nt, Influenza A virus
caauuggcguccucaucgg

SEQ ID NO: 9856 - RNA, 19 nt, Influenza A virus
caauugggauccucaucgg

SEQ ID NO: 9857 - RNA, 19 nt, Influenza A virus
caauugggcuccucaucgg

SEQ ID NO: 9858 - RNA, 19 nt, Influenza A virus
caguuggaguccucaucgg

SEQ ID NO: 9859 - RNA, 19 nt, Influenza A virus
ugcaauugggguccucguc

SEQ ID NO: 9860 - RNA, 19 nt, Influenza A virus
ugcaauugggguucucauc

SEQ ID NO: 9861 - RNA, 19 nt, Influenza A virus
ugcaguugggguccucauc

SEQ ID NO: 9862 - RNA, 19 nt, Influenza A virus
ugcgauugggguccucauc

SEQ ID NO: 9863 - RNA, 19 nt, Influenza A virus
ugcaauuaggguccucauc

SEQ ID NO: 9864 - RNA, 19 nt, Influenza A virus
ugcaauuggaguccucauc

SEQ ID NO: 9865 - RNA, 19 nt, Influenza A virus
ugcaauuggcguccucauc

SEQ ID NO: 9866 - RNA, 19 nt, Influenza A virus
ugcaauugggauccucauc

SEQ ID NO: 9867 - RNA, 19 nt, Influenza A virus
ugcaauugggcuccucauc

SEQ ID NO: 9868 - RNA, 19 nt, Influenza A virus
ugcaguuggaguccucauc

SEQ ID NO: 9869 - RNA, 19 nt, Influenza A virus
ucaaaaaugcaguuggggu

SEQ ID NO: 9870 - RNA, 19 nt, Influenza A virus
ucaaaaaugcgauuggggu

SEQ ID NO: 9871 - RNA, 19 nt, Influenza A virus
ucaaagaugcaauuggggu

SEQ ID NO: 9872 - RNA, 19 nt, Influenza A virus
ucaaaaaugcaauuagggu

SEQ ID NO: 9873 - RNA, 19 nt, Influenza A virus
ucaaaaaugcaauuggagu

SEQ ID NO: 9874 - RNA, 19 nt, Influenza A virus
ucaaaaaugcaauuggcgu

SEQ ID NO: 9875 - RNA, 19 nt, Influenza A virus
ucaaaaaugcaauugggau

SEQ ID NO: 9876 - RNA, 19 nt, Influenza A virus
ucaaaaaugcaauugggcu

SEQ ID NO: 9877 - RNA, 19 nt, Influenza A virus
ucaaaauugcaauuggggu

SEQ ID NO: 9878 - RNA, 19 nt, Influenza A virus
ucaaaaaugcaguuggagu

SEQ ID NO: 9879 - RNA, 19 nt, Influenza A virus
gucaaaaaugcaguugggg

SEQ ID NO: 9880 - RNA, 19 nt, Influenza A virus
gucaaaaaugcgauugggg

SEQ ID NO: 9881 - RNA, 19 nt, Influenza A virus
gucaaagaugcaauugggg

SEQ ID NO: 9882 - RNA, 19 nt, Influenza A virus
gucaaaaaugcaauuaggg

SEQ ID NO: 9883 - RNA, 19 nt, Influenza A virus
gucaaaaaugcaauuggag

SEQ ID NO: 9884 - RNA, 19 nt, Influenza A virus
gucaaaaaugcaauuggcg

SEQ ID NO: 9885 - RNA, 19 nt, Influenza A virus
gucaaaaaugcaauuggga

SEQ ID NO: 9886 - RNA, 19 nt, Influenza A virus
gucaaaaaugcaauugggc

SEQ ID NO: 9887 - RNA, 19 nt, Influenza A virus
gucaaaauugcaauugggg

SEQ ID NO: 9888 - RNA, 19 nt, Influenza A virus
gucaaaaaugcaguuggag

SEQ ID NO: 9889 - RNA, 19 nt, Influenza A virus
aaaaaugcaauugggguuc

SEQ ID NO: 9890 - RNA, 19 nt, Influenza A virus
aaaaaugcaguuggggucc

SEQ ID NO: 9891 - RNA, 19 nt, Influenza A virus
aaaaaugcgauuggggucc

SEQ ID NO: 9892 - RNA, 19 nt, Influenza A virus
aaagaugcaauuggggucc

SEQ ID NO: 9893 - RNA, 19 nt, Influenza A virus
aaaaaugcaauuagggucc

SEQ ID NO: 9894 - RNA, 19 nt, Influenza A virus
aaaaaugcaauuggagucc

SEQ ID NO: 9895 - RNA, 19 nt, Influenza A virus
aaaaaugcaauuggcgucc

SEQ ID NO: 9896 - RNA, 19 nt, Influenza A virus
aaaaaugcaauugggaucc

SEQ ID NO: 9897 - RNA, 19 nt, Influenza A virus
aaaaaugcaauugggcucc

SEQ ID NO: 9898 - RNA, 19 nt, Influenza A virus
aaaauugcaauuggggucc

SEQ ID NO: 9899 - RNA, 19 nt, Influenza A virus
aaaaaugcaguuggagucc

SEQ ID NO: 9900 - RNA, 19 nt, Influenza A virus
aaaaugcaauugggguucu

SEQ ID NO: 9901 - RNA, 19 nt, Influenza A virus
aaaaugcaguugggguccu

SEQ ID NO: 9902 - RNA, 19 nt, Influenza A virus
aaaaugcgauugggguccu

SEQ ID NO: 9903 - RNA, 19 nt, Influenza A virus
aagaugcaauugggguccu

SEQ ID NO: 9904 - RNA, 19 nt, Influenza A virus
aaaaugcaauuaggguccu

SEQ ID NO: 9905 - RNA, 19 nt, Influenza A virus
aaaaugcaauuggaguccu

SEQ ID NO: 9906 - RNA, 19 nt, Influenza A virus
aaaaugcaauuggcguccu

SEQ ID NO: 9907 - RNA, 19 nt, Influenza A virus
aaaaugcaauugggauccu

SEQ ID NO: 9908 - RNA, 19 nt, Influenza A virus
aaaaugcaauugggcuccu

SEQ ID NO: 9909 - RNA, 19 nt, Influenza A virus
aaauugcaauugggguccu

SEQ ID NO: 9910 - RNA, 19 nt, Influenza A virus
aaaaugcaguuggaguccu

SEQ ID NO: 9911 - RNA, 19 nt, Influenza A virus
augcaauugggguccucgu

SEQ ID NO: 9912 - RNA, 19 nt, Influenza A virus
augcaauugggguucucau

SEQ ID NO: 9913 - RNA, 19 nt, Influenza A virus
augcaguugggguccucau

SEQ ID NO: 9914 - RNA, 19 nt, Influenza A virus
augcgauugggguccucau

SEQ ID NO: 9915 - RNA, 19 nt, Influenza A virus
augcaauuaggguccucau

SEQ ID NO: 9916 - RNA, 19 nt, Influenza A virus
augcaauuggaguccucau

SEQ ID NO: 9917 - RNA, 19 nt, Influenza A virus
augcaauuggcguccucau

SEQ ID NO: 9918 - RNA, 19 nt, Influenza A virus
augcaauugggauccucau

SEQ ID NO: 9919 - RNA, 19 nt, Influenza A virus
augcaauugggcuccucau

SEQ ID NO: 9920 - RNA, 19 nt, Influenza A virus
uugcaauugggguccucau

SEQ ID NO: 9921 - RNA, 19 nt, Influenza A virus
augcaguuggaguccucau

SEQ ID NO: 9922 - RNA, 19 nt, Influenza A virus
caaaaaugcaauugggguu

SEQ ID NO: 9923 - RNA, 19 nt, Influenza A virus
caaaaaugcaguugggguc

SEQ ID NO: 9924 - RNA, 19 nt, Influenza A virus
caaaaaugcgauugggguc

SEQ ID NO: 9925 - RNA, 19 nt, Influenza A virus
caaagaugcaauugggguc

SEQ ID NO: 9926 - RNA, 19 nt, Influenza A virus
caaaaaugcaauuaggguc

SEQ ID NO: 9927 - RNA, 19 nt, Influenza A virus
caaaaaugcaauuggaguc

SEQ ID NO: 9928 - RNA, 19 nt, Influenza A virus
caaaaaugcaauuggcguc

SEQ ID NO: 9929 - RNA, 19 nt, Influenza A virus
caaaaaugcaauugggauc

SEQ ID NO: 9930 - RNA, 19 nt, Influenza A virus
caaaaaugcaauugggcuc

SEQ ID NO: 9931 - RNA, 19 nt, Influenza A virus
caaaauugcaauugggguc

SEQ ID NO: 9932 - RNA, 19 nt, Influenza A virus
caaaaaugcaguuggaguc

SEQ ID NO: 9933 - RNA, 19 nt, Influenza A virus
aaaugcaauugggguucuc

SEQ ID NO: 9934 - RNA, 19 nt, Influenza A virus
aaaugcaguugggguccuc

SEQ ID NO: 9935 - RNA, 19 nt, Influenza A virus
aaaugcgauugggguccuc

SEQ ID NO: 9936 - RNA, 19 nt, Influenza A virus
agaugcaauugggguccuc

SEQ ID NO: 9937 - RNA, 19 nt, Influenza A virus
aaaugcaauuaggguccuc

SEQ ID NO: 9938 - RNA, 19 nt, Influenza A virus
aaaugcaauuggaguccuc

SEQ ID NO: 9939 - RNA, 19 nt, Influenza A virus
aaaugcaauuggcguccuc

SEQ ID NO: 9940 - RNA, 19 nt, Influenza A virus
aaaugcaauugggauccuc

SEQ ID NO: 9941 - RNA, 19 nt, Influenza A virus
aaaugcaauugggcuccuc

SEQ ID NO: 9942 - RNA, 19 nt, Influenza A virus
aauugcaauugggguccuc

SEQ ID NO: 9943 - RNA, 19 nt, Influenza A virus
aaaugcaguuggaguccuc

SEQ ID NO: 9944 - RNA, 19 nt, Influenza A virus
aaugcaauugggguccucg

SEQ ID NO: 9945 - RNA, 19 nt, Influenza A virus
aaugcaauugggguucuca

SEQ ID NO: 9946 - RNA, 19 nt, Influenza A virus
aaugcaguugggguccuca

SEQ ID NO: 9947 - RNA, 19 nt, Influenza A virus
aaugcgauugggguccuca

SEQ ID NO: 9948 - RNA, 19 nt, Influenza A virus
gaugcaauugggguccuca

SEQ ID NO: 9949 - RNA, 19 nt, Influenza A virus
aaugcaauuaggguccuca

SEQ ID NO: 9950 - RNA, 19 nt, Influenza A virus
aaugcaauuggaguccuca

SEQ ID NO: 9951 - RNA, 19 nt, Influenza A virus
aaugcaauuggcguccuca

SEQ ID NO: 9952 - RNA, 19 nt, Influenza A virus
aaugcaauugggauccuca

SEQ ID NO: 9953 - RNA, 19 nt, Influenza A virus
aaugcaauugggcuccuca

SEQ ID NO: 9954 - RNA, 19 nt, Influenza A virus
auugcaauugggguccuca

SEQ ID NO: 9955 - RNA, 19 nt, Influenza A virus
aaugcaguuggaguccuca

SEQ ID NO: 9956 - RNA, 19 nt, Influenza A virus
ugaaggcgaauuucagugu

SEQ ID NO: 9957 - RNA, 19 nt, Influenza A virus
ugagagcgaauuucagugu

SEQ ID NO: 9958 - RNA, 19 nt, Influenza A virus
uaaaagcgaauuucagugu

SEQ ID NO: 9959 - RNA, 19 nt, Influenza A virus
ugaaagcaaauuucagugu

SEQ ID NO: 9960 - RNA, 19 nt, Influenza A virus
ugaaagcgaacuucagugu

SEQ ID NO: 9961 - RNA, 19 nt, Influenza A virus
ugaaagcgaauaucagugu

SEQ ID NO: 9962 - RNA, 19 nt, Influenza A virus
ugaaagcgaauuucagcgu

SEQ ID NO: 9963 - RNA, 19 nt, Influenza A virus
ugaaagcuaauuucagugu

SEQ ID NO: 9964 - RNA, 19 nt, Influenza A virus
uuaaagcgaauuucagugu

SEQ ID NO: 9965 - RNA, 19 nt, Influenza A virus
uaaaagcgaacuucagugu

SEQ ID NO: 9966 - RNA, 19 nt, Influenza A virus
ugaaagcaaacuucagugu

SEQ ID NO: 9967 - RNA, 19 nt, Influenza A virus
ugaaagcaaacuuuagugu

SEQ ID NO: 9968 - RNA, 19 nt, Influenza A virus
uugaucggcuucgccggga

SEQ ID NO: 9969 - RNA, 19 nt, Influenza A virus
ucgaucggcuucgccgaga

SEQ ID NO: 9970 - RNA, 19 nt, Influenza A virus
uugaccggcuucgccgaga

SEQ ID NO: 9971 - RNA, 19 nt, Influenza A virus
uugauaggcuucgccgaga

SEQ ID NO: 9972 - RNA, 19 nt, Influenza A virus
uugaucgacuucgccgaga

SEQ ID NO: 9973 - RNA, 19 nt, Influenza A virus
uugaucggauucgccgaga

SEQ ID NO: 9974 - RNA, 19 nt, Influenza A virus
uugaucggcuccgccgaga

SEQ ID NO: 9975 - RNA, 19 nt, Influenza A virus
uugaucggcuucaccgaga

SEQ ID NO: 9976 - RNA, 19 nt, Influenza A virus
uugaucggcuucgcagaga

SEQ ID NO: 9977 - RNA, 19 nt, Influenza A virus
uugaucggcuucgccgaua

SEQ ID NO: 9978 - RNA, 19 nt, Influenza A virus
uugauagacuucgccgaga

SEQ ID NO: 9979 - RNA, 19 nt, Influenza A virus
uugaucgacuucgcagaga

SEQ ID NO: 9980 - RNA, 19 nt, Influenza A virus
  modified_base (18)..(19): a, c, g, u, unknown or other
uugaucggcuucgccgann

SEQ ID NO: 9981 - RNA, 19 nt, Influenza A virus
uagaccggcuucgccggga

SEQ ID NO: 9982 - RNA, 19 nt, Influenza A virus
uugaccggguuugccgaga

SEQ ID NO: 9983 - RNA, 19 nt, Influenza A virus
cuugaucggcuucgccggg

SEQ ID NO: 9984 - RNA, 19 nt, Influenza A virus
auugaucggcuucgccgag

SEQ ID NO: 9985 - RNA, 19 nt, Influenza A virus
cucgaucggcuucgccgag

SEQ ID NO: 9986 - RNA, 19 nt, Influenza A virus
cuugaccggcuucgccgag

SEQ ID NO: 9987 - RNA, 19 nt, Influenza A virus
cuugauaggcuucgccgag

SEQ ID NO: 9988 - RNA, 19 nt, Influenza A virus
cuugaucgacuucgccgag

SEQ ID NO: 9989 - RNA, 19 nt, Influenza A virus
cuugaucggauucgccgag

SEQ ID NO: 9990 - RNA, 19 nt, Influenza A virus
cuugaucggcuccgccgag

SEQ ID NO: 9991 - RNA, 19 nt, Influenza A virus
cuugaucggcuucaccgag

SEQ ID NO: 9992 - RNA, 19 nt, Influenza A virus
cuugaucggcuucgcagag

SEQ ID NO: 9993 - RNA, 19 nt, Influenza A virus
  modified_base (19)..(19): a, c, g, u, unknown or other
cuugaucggcuucgccgan

SEQ ID NO: 9994 - RNA, 19 nt, Influenza A virus
cuugaucggcuucgccgau

SEQ ID NO: 9995 - RNA, 19 nt, Influenza A virus
cuugauagacuucgccgag

SEQ ID NO: 9996 - RNA, 19 nt, Influenza A virus
cuugaucgacuucgcagag

SEQ ID NO: 9997 - RNA, 19 nt, Influenza A virus
cuagaccggcuucgccggg

SEQ ID NO: 9998 - RNA, 19 nt, Influenza A virus
cuugaccggguuugccgag

SEQ ID NO: 9999 - RNA, 19 nt, Influenza A virus
gaaggcgaauuucagugug

SEQ ID NO: 10000 - RNA, 19 nt, Influenza A virus
gagagcgaauuucagugug

SEQ ID NO: 10001 - RNA, 19 nt, Influenza A virus
aaaagcgaauuucagugug

SEQ ID NO: 10002 - RNA, 19 nt, Influenza A virus
gaaagcaaauuucagugug

SEQ ID NO: 10003 - RNA, 19 nt, Influenza A virus
gaaagcgaacuucagugug

SEQ ID NO: 10004 - RNA, 19 nt, Influenza A virus
gaaagcgaauaucagugug

SEQ ID NO: 10005 - RNA, 19 nt, Influenza A virus
gaaagcgaauuucagcgug

SEQ ID NO: 10006 - RNA, 19 nt, Influenza A virus
gaaagcgaauuucagugua

SEQ ID NO: 10007 - RNA, 19 nt, Influenza A virus
gaaagcuaauuucagugug

SEQ ID NO: 10008 - RNA, 19 nt, Influenza A virus
uaaagcgaauuucagugug

SEQ ID NO: 10009 - RNA, 19 nt, Influenza A virus
aaaagcgaacuucagugug

SEQ ID NO: 10010 - RNA, 19 nt, Influenza A virus
gaaagcaaacuucagugug

SEQ ID NO: 10011 - RNA, 19 nt, Influenza A virus
gaaagcaaacuuuagugug

SEQ ID NO: 10012 - RNA, 19 nt, Influenza A virus
aucggcuucgccgggauca

SEQ ID NO: 10013 - RNA, 19 nt, Influenza A virus
accggcuucgccgagauca

SEQ ID NO: 10014 - RNA, 19 nt, Influenza A virus
auaggcuucgccgagauca

SEQ ID NO: 10015 - RNA, 19 nt, Influenza A virus
aucgacuucgccgagauca

SEQ ID NO: 10016 - RNA, 19 nt, Influenza A virus
aucggauucgccgagauca

SEQ ID NO: 10017 - RNA, 19 nt, Influenza A virus
aucggcuccgccgagauca

SEQ ID NO: 10018 - RNA, 19 nt, Influenza A virus
aucggcuucaccgagauca

SEQ ID NO: 10019 - RNA, 19 nt, Influenza A virus
aucggcuucgcagagauca

SEQ ID NO: 10020 - RNA, 19 nt, Influenza A virus
aucggcuucgccgagacca

SEQ ID NO: 10021 - RNA, 19 nt, Influenza A virus
aucggcuucgccgagauaa

SEQ ID NO: 10022 - RNA, 19 nt, Influenza A virus
aucggcuucgccgauauca

SEQ ID NO: 10023 - RNA, 19 nt, Influenza A virus
accggcuucgccgggauca

SEQ ID NO: 10024 - RNA, 19 nt, Influenza A virus
auagacuucgccgagauca

SEQ ID NO: 10025 - RNA, 19 nt, Influenza A virus
aucgacuucgcagagauca

SEQ ID NO: 10026 - RNA, 19 nt, Influenza A virus
aucggcuccgccgagaucu

SEQ ID NO: 10027 - RNA, 19 nt, Influenza A virus
  modified_base (15)..(16): a, c, g, u, unknown or other
aucggcuucgccgannuca

SEQ ID NO: 10028 - RNA, 19 nt, Influenza A virus
accggguuugccgagauca

SEQ ID NO: 10029 - RNA, 19 nt, Influenza A virus
gaucggcuucgccgggauc

SEQ ID NO: 10030 - RNA, 19 nt, Influenza A virus
gaccggcuucgccgagauc

SEQ ID NO: 10031 - RNA, 19 nt, Influenza A virus
gauaggcuucgccgagauc

SEQ ID NO: 10032 - RNA, 19 nt, Influenza A virus
gaucgacuucgccgagauc

SEQ ID NO: 10033 - RNA, 19 nt, Influenza A virus
gaucggauucgccgagauc

SEQ ID NO: 10034 - RNA, 19 nt, Influenza A virus
gaucggcuccgccgagauc

SEQ ID NO: 10035 - RNA, 19 nt, Influenza A virus
gaucggcuucaccgagauc

SEQ ID NO: 10036 - RNA, 19 nt, Influenza A virus
gaucggcuucgcagagauc

SEQ ID NO: 10037 - RNA, 19 nt, Influenza A virus
gaucggcuucgccgagacc

SEQ ID NO: 10038 - RNA, 19 nt, Influenza A virus
gaucggcuucgccgagaua

SEQ ID NO: 10039 - RNA, 19 nt, Influenza A virus
gaucggcuucgccgauauc

SEQ ID NO: 10040 - RNA, 19 nt, Influenza A virus
gaccggcuucgccgggauc

SEQ ID NO: 10041 - RNA, 19 nt, Influenza A virus
gauagacuucgccgagauc

SEQ ID NO: 10042 - RNA, 19 nt, Influenza A virus
gaucgacuucgcagagauc

SEQ ID NO: 10043 - RNA, 19 nt, Influenza A virus
  modified_base (16)..(17): a, c, g, u, unknown or other
gaucggcuucgccgannuc

SEQ ID NO: 10044 - RNA, 19 nt, Influenza A virus
gaccggguuugccgagauc

SEQ ID NO: 10045 - RNA, 19 nt, Influenza A virus
ugaucggcuucgccgggau

SEQ ID NO: 10046 - RNA, 19 nt, Influenza A virus
cgaucggcuucgccgagau

SEQ ID NO: 10047 - RNA, 19 nt, Influenza A virus
ugaccggcuucgccgagau

SEQ ID NO: 10048 - RNA, 19 nt, Influenza A virus
ugauaggcuucgccgagau

SEQ ID NO: 10049 - RNA, 19 nt, Influenza A virus
ugaucgacuucgccgagau

SEQ ID NO: 10050 - RNA, 19 nt, Influenza A virus
ugaucggauucgccgagau

SEQ ID NO: 10051 - RNA, 19 nt, Influenza A virus
ugaucggcuccgccgagau

SEQ ID NO: 10052 - RNA, 19 nt, Influenza A virus
ugaucggcuucaccgagau

SEQ ID NO: 10053 - RNA, 19 nt, Influenza A virus
ugaucggcuucgcagagau

SEQ ID NO: 10054 - RNA, 19 nt, Influenza A virus
ugaucggcuucgccgagac

SEQ ID NO: 10055 - RNA, 19 nt, Influenza A virus
ugaucggcuucgccgauau

SEQ ID NO: 10056 - RNA, 19 nt, Influenza A virus
ugauagacuucgccgagau

SEQ ID NO: 10057 - RNA, 19 nt, Influenza A virus
ugaucgacuucgcagagau

SEQ ID NO: 10058 - RNA, 19 nt, Influenza A virus
  modified_base (17)..(18): a, c, g, u, unknown or other
ugaucggcuucgccgannu

SEQ ID NO: 10059 - RNA, 19 nt, Influenza A virus
agaccggcuucgccgggau

SEQ ID NO: 10060 - RNA, 19 nt, Influenza A virus
ugaccggguuugccgagau

SEQ ID NO: 10061 - RNA, 19 nt, Influenza A virus
ucggcuucgccgggaucag

SEQ ID NO: 10062 - RNA, 19 nt, Influenza A virus
ccggcuucgccgagaucag

SEQ ID NO: 10063 - RNA, 19 nt, Influenza A virus
uaggcuucgccgagaucag

SEQ ID NO: 10064 - RNA, 19 nt, Influenza A virus
ucgacuucgccgagaucag

SEQ ID NO: 10065 - RNA, 19 nt, Influenza A virus
ucggauucgccgagaucag

SEQ ID NO: 10066 - RNA, 19 nt, Influenza A virus
ucggcuccgccgagaucag

SEQ ID NO: 10067 - RNA, 19 nt, Influenza A virus
ucggcuucaccgagaucag

SEQ ID NO: 10068 - RNA, 19 nt, Influenza A virus
ucggcuucgcagagaucag

SEQ ID NO: 10069 - RNA, 19 nt, Influenza A virus
ucggcuucgccgagaccag

SEQ ID NO: 10070 - RNA, 19 nt, Influenza A virus
ucggcuucgccgagauaag

SEQ ID NO: 10071 - RNA, 19 nt, Influenza A virus
ucggcuucgccgagaucaa

SEQ ID NO: 10072 - RNA, 19 nt, Influenza A virus
ucggcuucgccgauaucag

SEQ ID NO: 10073 - RNA, 19 nt, Influenza A virus
ccggcuucgccgggaucag

SEQ ID NO: 10074 - RNA, 19 nt, Influenza A virus
ccggcuucgccgagaucaa

SEQ ID NO: 10075 - RNA, 19 nt, Influenza A virus
uagacuucgccgagaucag

SEQ ID NO: 10076 - RNA, 19 nt, Influenza A virus
ucgacuucgcagagaucag

SEQ ID NO: 10077 - RNA, 19 nt, Influenza A virus
ucggcuccgccgagaucaa

SEQ ID NO: 10078 - RNA, 19 nt, Influenza A virus
  modified_base (14)..(15): a, c, g, u, unknown or other
ucggcuucgccgannucag

SEQ ID NO: 10079 - RNA, 19 nt, Influenza A virus
ccggguuugccgagaucag

SEQ ID NO: 10080 - RNA, 19 nt, Influenza A virus
gagcaauuguuggugaaau

SEQ ID NO: 10081 - RNA, 19 nt, Influenza A virus
gagcaguuguuggcgaaau

SEQ ID NO: 10082 - RNA, 19 nt, Influenza A virus
gaguaauuguuggcgaaau

SEQ ID NO: 10083 - RNA, 19 nt, Influenza A virus
gggcaauuguuggcgaaau

SEQ ID NO: 10084 - RNA, 19 nt, Influenza A virus
gggcaauuguuggcgagau

SEQ ID NO: 10085 - RNA, 19 nt, Influenza A virus
aagcaauuguuggcgaaau

SEQ ID NO: 10086 - RNA, 19 nt, Influenza A virus
gaacaauuguuggcgaaau

SEQ ID NO: 10087 - RNA, 19 nt, Influenza A virus
gagcaauuauuggcgaaau

SEQ ID NO: 10088 - RNA, 19 nt, Influenza A virus
gagcaauuguaggcgaaau

SEQ ID NO: 10089 - RNA, 19 nt, Influenza A virus
gagcaauugugggcgaaau

SEQ ID NO: 10090 - RNA, 19 nt, Influenza A virus
gagcaauuguugccgaaau

SEQ ID NO: 10091 - RNA, 19 nt, Influenza A virus
gcgcaauuguuggcgaaau

SEQ ID NO: 10092 - RNA, 19 nt, Influenza A virus
gaacaauuguuggugaaau

SEQ ID NO: 10093 - RNA, 19 nt, Influenza A virus
ggacaauuguuggcgaaau

SEQ ID NO: 10094 - RNA, 19 nt, Influenza A virus
gggcaauuguaggcgaaau

SEQ ID NO: 10095 - RNA, 19 nt, Influenza A virus
gacgaauuguuggcgaaau

SEQ ID NO: 10096 - RNA, 19 nt, Influenza A virus
gagcaauagugggcgaaau

SEQ ID NO: 10097 - RNA, 19 nt, Influenza A virus
gagcaaucguuggagaaau

SEQ ID NO: 10098 - RNA, 19 nt, Influenza A virus
gagcaaucguuggagagau

SEQ ID NO: 10099 - RNA, 19 nt, Influenza A virus
ggagcaauuguuggugaaa

SEQ ID NO: 10100 - RNA, 19 nt, Influenza A virus
ggagcaguuguuggcgaaa

SEQ ID NO: 10101 - RNA, 19 nt, Influenza A virus
ggaguaauuguuggcgaaa

SEQ ID NO: 10102 - RNA, 19 nt, Influenza A virus
ggggcaauuguuggcgaaa

SEQ ID NO: 10103 - RNA, 19 nt, Influenza A virus
ggggcaauuguuggcgaga

SEQ ID NO: 10104 - RNA, 19 nt, Influenza A virus
gaagcaauuguuggcgaaa

SEQ ID NO: 10105 - RNA, 19 nt, Influenza A virus
ggaacaauuguuggcgaaa

SEQ ID NO: 10106 - RNA, 19 nt, Influenza A virus
ggagcaauuauuggcgaaa

SEQ ID NO: 10107 - RNA, 19 nt, Influenza A virus
ggagcaauuguaggcgaaa

SEQ ID NO: 10108 - RNA, 19 nt, Influenza A virus
ggagcaauugugggcgaaa

SEQ ID NO: 10109 - RNA, 19 nt, Influenza A virus
ggagcaauuguugccgaaa

SEQ ID NO: 10110 - RNA, 19 nt, Influenza A virus
ggcgcaauuguuggcgaaa

SEQ ID NO: 10111 - RNA, 19 nt, Influenza A virus
ggaacaauuguuggugaaa

SEQ ID NO: 10112 - RNA, 19 nt, Influenza A virus
gggacaauuguuggcgaaa

SEQ ID NO: 10113 - RNA, 19 nt, Influenza A virus
ggggcaauuguaggcgaaa

SEQ ID NO: 10114 - RNA, 19 nt, Influenza A virus
ggacgaauuguuggcgaaa

SEQ ID NO: 10115 - RNA, 19 nt, Influenza A virus
ggagcaauagugggcgaaa

SEQ ID NO: 10116 - RNA, 19 nt, Influenza A virus
ggagcaaucguuggagaaa

SEQ ID NO: 10117 - RNA, 19 nt, Influenza A virus
ggagcaaucguuggagaga

SEQ ID NO: 10118 - RNA, 19 nt, Influenza A virus
uuucuugaucggcuucgcc

SEQ ID NO: 10119 - RNA, 19 nt, Influenza A virus
uucauugaucggcuucgcc

SEQ ID NO: 10120 - RNA, 19 nt, Influenza A virus
uuccuugaccggcuucgcc

SEQ ID NO: 10121 - RNA, 19 nt, Influenza A virus
uuccuugauaggcuucgcc

SEQ ID NO: 10122 - RNA, 19 nt, Influenza A virus
uuccuugaucgacuucgcc

SEQ ID NO: 10123 - RNA, 19 nt, Influenza A virus
uuccuugaucggauucgcc

SEQ ID NO: 10124 - RNA, 19 nt, Influenza A virus
uuccuugaucggcuccgcc

SEQ ID NO: 10125 - RNA, 19 nt, Influenza A virus
uuccuugaucggcuucacc

SEQ ID NO: 10126 - RNA, 19 nt, Influenza A virus
uuccuugaucggcuucgca

SEQ ID NO: 10127 - RNA, 19 nt, Influenza A virus
uuucucgaucggcuucgcc

SEQ ID NO: 10128 - RNA, 19 nt, Influenza A virus
uuccuugauagacuucgcc

SEQ ID NO: 10129 - RNA, 19 nt, Influenza A virus
uuccuugaccggguuugcc

SEQ ID NO: 10130 - RNA, 19 nt, Influenza A virus
uuucuagaccggcuucgcc

SEQ ID NO: 10131 - RNA, 19 nt, Influenza A virus
uucuugaucggcuucgccg

SEQ ID NO: 10132 - RNA, 19 nt, Influenza A virus
ucauugaucggcuucgccg

SEQ ID NO: 10133 - RNA, 19 nt, Influenza A virus
uccuugaccggcuucgccg

SEQ ID NO: 10134 - RNA, 19 nt, Influenza A virus
uccuugauaggcuucgccg

SEQ ID NO: 10135 - RNA, 19 nt, Influenza A virus
uccuugaucgacuucgccg

SEQ ID NO: 10136 - RNA, 19 nt, Influenza A virus
uccuugaucggauucgccg

SEQ ID NO: 10137 - RNA, 19 nt, Influenza A virus
uccuugaucggcuccgccg

SEQ ID NO: 10138 - RNA, 19 nt, Influenza A virus
uccuugaucggcuucaccg

SEQ ID NO: 10139 - RNA, 19 nt, Influenza A virus
uccuugaucggcuucgcag

SEQ ID NO: 10140 - RNA, 19 nt, Influenza A virus
uucucgaucggcuucgccg

SEQ ID NO: 10141 - RNA, 19 nt, Influenza A virus
uccuugauagacuucgccg

SEQ ID NO: 10142 - RNA, 19 nt, Influenza A virus
uccuugaccggguuugccg

SEQ ID NO: 10143 - RNA, 19 nt, Influenza A virus
uucuagaccggcuucgccg

SEQ ID NO: 10144 - RNA, 19 nt, Influenza A virus
gggagcaauuguuggugaa

SEQ ID NO: 10145 - RNA, 19 nt, Influenza A virus
gggagcaguuguuggcgaa

SEQ ID NO: 10146 - RNA, 19 nt, Influenza A virus
gggaguaauuguuggcgaa

SEQ ID NO: 10147 - RNA, 19 nt, Influenza A virus
gggggcaauuguuggcgaa

SEQ ID NO: 10148 - RNA, 19 nt, Influenza A virus
gggggcaauuguuggcgag

SEQ ID NO: 10149 - RNA, 19 nt, Influenza A virus
aggagcaauuguuggcgaa

SEQ ID NO: 10150 - RNA, 19 nt, Influenza A virus
ggaagcaauuguuggcgaa

SEQ ID NO: 10151 - RNA, 19 nt, Influenza A virus
gggaacaauuguuggcgaa

SEQ ID NO: 10152 - RNA, 19 nt, Influenza A virus
gggagcaauuauuggcgaa

SEQ ID NO: 10153 - RNA, 19 nt, Influenza A virus
gggagcaauuguaggcgaa

SEQ ID NO: 10154 - RNA, 19 nt, Influenza A virus
gggagcaauuguugccgaa

SEQ ID NO: 10155 - RNA, 19 nt, Influenza A virus
gggcgcaauuguuggcgaa

SEQ ID NO: 10156 - RNA, 19 nt, Influenza A virus
gggaacaauuguuggugaa

SEQ ID NO: 10157 - RNA, 19 nt, Influenza A virus
ggggacaauuguuggcgaa

SEQ ID NO: 10158 - RNA, 19 nt, Influenza A virus
aggagcaauugugggcgaa

SEQ ID NO: 10159 - RNA, 19 nt, Influenza A virus
gggacgaauuguuggcgaa

SEQ ID NO: 10160 - RNA, 19 nt, Influenza A virus
gggagcaaucguuggagaa

SEQ ID NO: 10161 - RNA, 19 nt, Influenza A virus
aggggcaauuguaggcgaa

SEQ ID NO: 10162 - RNA, 19 nt, Influenza A virus
gggagcaaucguuggagag

SEQ ID NO: 10163 - RNA, 19 nt, Influenza A virus
agggagcaauuguugguga

SEQ ID NO: 10164 - RNA, 19 nt, Influenza A virus
agggagcaguuguuggcga

SEQ ID NO: 10165 - RNA, 19 nt, Influenza A virus
agggaguaauuguuggcga

SEQ ID NO: 10166 - RNA, 19 nt, Influenza A virus
agggggcaauuguuggcga

SEQ ID NO: 10167 - RNA, 19 nt, Influenza A virus
aaggagcaauuguuggcga

SEQ ID NO: 10168 - RNA, 19 nt, Influenza A virus
aggaagcaauuguuggcga

SEQ ID NO: 10169 - RNA, 19 nt, Influenza A virus
agggaacaauuguuggcga

SEQ ID NO: 10170 - RNA, 19 nt, Influenza A virus
agggagcaauuauuggcga

SEQ ID NO: 10171 - RNA, 19 nt, Influenza A virus
agggagcaauuguaggcga

SEQ ID NO: 10172 - RNA, 19 nt, Influenza A virus
agggagcaauuguugccga

SEQ ID NO: 10173 - RNA, 19 nt, Influenza A virus
agggcgcaauuguuggcga

SEQ ID NO: 10174 - RNA, 19 nt, Influenza A virus
cgggagcaauuguuggcga

SEQ ID NO: 10175 - RNA, 19 nt, Influenza A virus
agggaacaauuguugguga

SEQ ID NO: 10176 - RNA, 19 nt, Influenza A virus
aggggacaauuguuggcga

SEQ ID NO: 10177 - RNA, 19 nt, Influenza A virus
aaggagcaauugugggcga

SEQ ID NO: 10178 - RNA, 19 nt, Influenza A virus
agggacgaauuguuggcga

SEQ ID NO: 10179 - RNA, 19 nt, Influenza A virus
agggagcaaucguuggaga

SEQ ID NO: 10180 - RNA, 19 nt, Influenza A virus
aaggggcaauuguaggcga

SEQ ID NO: 10181 - RNA, 19 nt, Influenza A virus
ccuugaucggcuucgccgg

SEQ ID NO: 10182 - RNA, 19 nt, Influenza A virus
ucuugaucggcuucgccga

SEQ ID NO: 10183 - RNA, 19 nt, Influenza A virus
cauugaucggcuucgccga

SEQ ID NO: 10184 - RNA, 19 nt, Influenza A virus
ccuugaccggcuucgccga

SEQ ID NO: 10185 - RNA, 19 nt, Influenza A virus
ccuugauaggcuucgccga

SEQ ID NO: 10186 - RNA, 19 nt, Influenza A virus
ccuugaucgacuucgccga

SEQ ID NO: 10187 - RNA, 19 nt, Influenza A virus
ccuugaucggauucgccga

SEQ ID NO: 10188 - RNA, 19 nt, Influenza A virus
ccuugaucggcuccgccga

SEQ ID NO: 10189 - RNA, 19 nt, Influenza A virus
ccuugaucggcuucaccga

SEQ ID NO: 10190 - RNA, 19 nt, Influenza A virus
ccuugaucggcuucgcaga

SEQ ID NO: 10191 - RNA, 19 nt, Influenza A virus
ucucgaucggcuucgccga

SEQ ID NO: 10192 - RNA, 19 nt, Influenza A virus
ccuugauagacuucgccga

SEQ ID NO: 10193 - RNA, 19 nt, Influenza A virus
ccuugaucgacuucgcaga

SEQ ID NO: 10194 - RNA, 19 nt, Influenza A virus
ccuugaccggguuugccga

SEQ ID NO: 10195 - RNA, 19 nt, Influenza A virus
gagggagcaauuguuggug

SEQ ID NO: 10196 - RNA, 19 nt, Influenza A virus
gagggagcaguuguuggcg

SEQ ID NO: 10197 - RNA, 19 nt, Influenza A virus
gagggaguaauuguuggcg

SEQ ID NO: 10198 - RNA, 19 nt, Influenza A virus
gagggggcaauuguuggcg

SEQ ID NO: 10199 - RNA, 19 nt, Influenza A virus
aagggagcaauuguuggcg

SEQ ID NO: 10200 - RNA, 19 nt, Influenza A virus
gaaggagcaauuguuggcg

SEQ ID NO: 10201 - RNA, 19 nt, Influenza A virus
gaggaagcaauuguuggcg

SEQ ID NO: 10202 - RNA, 19 nt, Influenza A virus
gagggaacaauuguuggcg

SEQ ID NO: 10203 - RNA, 19 nt, Influenza A virus
gagggagcaauuauuggcg

SEQ ID NO: 10204 - RNA, 19 nt, Influenza A virus
gagggagcaauuguaggcg

SEQ ID NO: 10205 - RNA, 19 nt, Influenza A virus
gagggagcaauuguugccg

SEQ ID NO: 10206 - RNA, 19 nt, Influenza A virus
gagggcgcaauuguuggcg

SEQ ID NO: 10207 - RNA, 19 nt, Influenza A virus
gcgggagcaauuguuggcg

SEQ ID NO: 10208 - RNA, 19 nt, Influenza A virus
gagggaacaauuguuggug

SEQ ID NO: 10209 - RNA, 19 nt, Influenza A virus
gaggggacaauuguuggcg

SEQ ID NO: 10210 - RNA, 19 nt, Influenza A virus
gaaggagcaauugugggcg

SEQ ID NO: 10211 - RNA, 19 nt, Influenza A virus
gagggacgaauuguuggcg

SEQ ID NO: 10212 - RNA, 19 nt, Influenza A virus
gagggagcaaucguuggag

SEQ ID NO: 10213 - RNA, 19 nt, Influenza A virus
gaaggggcaauuguaggcg

SEQ ID NO: 10214 - RNA, 19 nt, Influenza A virus
agggcuuucaccgaggagg

SEQ ID NO: 10215 - RNA, 19 nt, Influenza A virus
agggcuuucacugaagagg

SEQ ID NO: 10216 - RNA, 19 nt, Influenza A virus
agggcuuucaucgaagagg

SEQ ID NO: 10217 - RNA, 19 nt, Influenza A virus
agggcuuuuaccgaagagg

SEQ ID NO: 10218 - RNA, 19 nt, Influenza A virus
agggcuuucacugaggagg

SEQ ID NO: 10219 - RNA, 19 nt, Influenza A virus
agagcuuucaccgaagagg

SEQ ID NO: 10220 - RNA, 19 nt, Influenza A virus
agggccuucaccgaagagg

SEQ ID NO: 10221 - RNA, 19 nt, Influenza A virus
agggcuaucaccgaagagg

SEQ ID NO: 10222 - RNA, 19 nt, Influenza A virus
agggcuuucacagaagagg

SEQ ID NO: 10223 - RNA, 19 nt, Influenza A virus
agggcuuucaccaaagagg

SEQ ID NO: 10224 - RNA, 19 nt, Influenza A virus
agggcuuucaccgaaaagg

SEQ ID NO: 10225 - RNA, 19 nt, Influenza A virus
agggcuuucaccgaagaag

SEQ ID NO: 10226 - RNA, 19 nt, Influenza A virus
agggcuuucaccgaagcgg

SEQ ID NO: 10227 - RNA, 19 nt, Influenza A virus
agggguuucaccgaagagg

SEQ ID NO: 10228 - RNA, 19 nt, Influenza A virus
agggccuucaccgaggagg

SEQ ID NO: 10229 - RNA, 19 nt, Influenza A virus
gggcuuucaccgaggaggg

SEQ ID NO: 10230 - RNA, 19 nt, Influenza A virus
gggcuuucacugaagaggg

SEQ ID NO: 10231 - RNA, 19 nt, Influenza A virus
gggcuuucaucgaagaggg

SEQ ID NO: 10232 - RNA, 19 nt, Influenza A virus
gggcuuuuaccgaagaggg

SEQ ID NO: 10233 - RNA, 19 nt, Influenza A virus
gggcuuucacugaggaggg

SEQ ID NO: 10234 - RNA, 19 nt, Influenza A virus
gagcuuucaccgaagaggg

SEQ ID NO: 10235 - RNA, 19 nt, Influenza A virus
gggccuucaccgaagaggg

SEQ ID NO: 10236 - RNA, 19 nt, Influenza A virus
gggcuaucaccgaagaggg

SEQ ID NO: 10237 - RNA, 19 nt, Influenza A virus
gggcuuucacagaagaggg

SEQ ID NO: 10238 - RNA, 19 nt, Influenza A virus
gggcuuucaccaaagaggg

SEQ ID NO: 10239 - RNA, 19 nt, Influenza A virus
gggcuuucaccgaaaaggg

SEQ ID NO: 10240 - RNA, 19 nt, Influenza A virus
gggcuuucaccgaagaagg

SEQ ID NO: 10241 - RNA, 19 nt, Influenza A virus
gggcuuucaccgaagagga

SEQ ID NO: 10242 - RNA, 19 nt, Influenza A virus
gggcuuucaccgaagcggg

SEQ ID NO: 10243 - RNA, 19 nt, Influenza A virus
gggguuucaccgaagaggg

SEQ ID NO: 10244 - RNA, 19 nt, Influenza A virus
gggccuucaccgaggaggg

SEQ ID NO: 10245 - RNA, 19 nt, Influenza A virus
auaagauggcugauugagg

SEQ ID NO: 10246 - RNA, 19 nt, Influenza A virus
auaagaugguugauugaag

SEQ ID NO: 10247 - RNA, 19 nt, Influenza A virus
auaagguggcugauugaag

SEQ ID NO: 10248 - RNA, 19 nt, Influenza A virus
augagauggcugauugaag

SEQ ID NO: 10249 - RNA, 19 nt, Influenza A virus
auaagguggcugauugagg

SEQ ID NO: 10250 - RNA, 19 nt, Influenza A virus
auaagauggcuaauugaag

SEQ ID NO: 10251 - RNA, 19 nt, Influenza A virus
auaagauggcugaucgaag

SEQ ID NO: 10252 - RNA, 19 nt, Influenza A virus
  modified_base (5)..(5): a, c, g, u, unknown or other
auaanauggcugauugaag

SEQ ID NO: 10253 - RNA, 19 nt, Influenza A virus
auaagaugguuaauugaag

SEQ ID NO: 10254 - RNA, 19 nt, Influenza A virus
auaaggugguuaauugaag

SEQ ID NO: 10255 - RNA, 19 nt, Influenza A virus
uaagauggcugauugagga

SEQ ID NO: 10256 - RNA, 19 nt, Influenza A virus
uaagaugguugauugaaga

SEQ ID NO: 10257 - RNA, 19 nt, Influenza A virus
uaagguggcugauugaaga

SEQ ID NO: 10258 - RNA, 19 nt, Influenza A virus
ugagauggcugauugaaga

SEQ ID NO: 10259 - RNA, 19 nt, Influenza A virus
uaagguggcugauugagga

SEQ ID NO: 10260 - RNA, 19 nt, Influenza A virus
uaagauggcuaauugaaga

SEQ ID NO: 10261 - RNA, 19 nt, Influenza A virus
uaagauggcugaucgaaga

SEQ ID NO: 10262 - RNA, 19 nt, Influenza A virus
  modified_base (4)..(4): a, c, g, u, unknown or other
uaanauggcugauugaaga

SEQ ID NO: 10263 - RNA, 19 nt, Influenza A virus
uaagaugguuaauugaaga

SEQ ID NO: 10264 - RNA, 19 nt, Influenza A virus
uaaggugguuaauugaaga

SEQ ID NO: 10265 - RNA, 19 nt, Influenza A virus
aagauggcugauugaagag

SEQ ID NO: 10266 - RNA, 19 nt, Influenza A virus
aagauggcugauugaggaa

SEQ ID NO: 10267 - RNA, 19 nt, Influenza A virus
aagaugguugauugaagaa

SEQ ID NO: 10268 - RNA, 19 nt, Influenza A virus
aagguggcugauugaagaa

SEQ ID NO: 10269 - RNA, 19 nt, Influenza A virus
gagauggcugauugaagaa

SEQ ID NO: 10270 - RNA, 19 nt, Influenza A virus
aagguggcugauugaggaa

SEQ ID NO: 10271 - RNA, 19 nt, Influenza A virus
aagauggcuaauugaagaa

SEQ ID NO: 10272 - RNA, 19 nt, Influenza A virus
aagauggcugaucgaagaa

SEQ ID NO: 10273 - RNA, 19 nt, Influenza A virus
  modified_base (3)..(3): a, c, g, u, unknown or other
aanauggcugauugaagaa

SEQ ID NO: 10274 - RNA, 19 nt, Influenza A virus
aagaugguuaauugaagaa

SEQ ID NO: 10275 - RNA, 19 nt, Influenza A virus
aaggugguuaauugaagaa

SEQ ID NO: 10276 - RNA, 19 nt, Influenza A virus
cuaagggcuuucaccgagg

SEQ ID NO: 10277 - RNA, 19 nt, Influenza A virus
cuaagggcuuucacugaag

SEQ ID NO: 10278 - RNA, 19 nt, Influenza A virus
cuaagggcuuucaucgaag

SEQ ID NO: 10279 - RNA, 19 nt, Influenza A virus
cuaagggcuuuuaccgaag

SEQ ID NO: 10280 - RNA, 19 nt, Influenza A virus
cugagggcuuucaccgaag

SEQ ID NO: 10281 - RNA, 19 nt, Influenza A virus
uuaagggcuuucaccgaag

SEQ ID NO: 10282 - RNA, 19 nt, Influenza A virus
cuaagggcuuucacugagg

SEQ ID NO: 10283 - RNA, 19 nt, Influenza A virus
caaagggcuuucaccgaag

SEQ ID NO: 10284 - RNA, 19 nt, Influenza A virus
cuaagagcuuucaccgaag

SEQ ID NO: 10285 - RNA, 19 nt, Influenza A virus
cuaagggccuucaccgaag

SEQ ID NO: 10286 - RNA, 19 nt, Influenza A virus
cuaagggcuaucaccgaag

SEQ ID NO: 10287 - RNA, 19 nt, Influenza A virus
cuaagggcuuucacagaag

SEQ ID NO: 10288 - RNA, 19 nt, Influenza A virus
cuaagggcuuucaccaaag

SEQ ID NO: 10289 - RNA, 19 nt, Influenza A virus
cuaagggcuuucaccgaaa

SEQ ID NO: 10290 - RNA, 19 nt, Influenza A virus
cuaagggguuucaccgaag

SEQ ID NO: 10291 - RNA, 19 nt, Influenza A virus
cuuagggcuuucaccgaag

SEQ ID NO: 10292 - RNA, 19 nt, Influenza A virus
cuaagggccuucaccgagg

SEQ ID NO: 10293 - RNA, 19 nt, Influenza A virus
aagggcuuucaccgaggag

SEQ ID NO: 10294 - RNA, 19 nt, Influenza A virus
aagggcuuucacugaagag

SEQ ID NO: 10295 - RNA, 19 nt, Influenza A virus
aagggcuuucaucgaagag

SEQ ID NO: 10296 - RNA, 19 nt, Influenza A virus
aagggcuuuuaccgaagag

SEQ ID NO: 10297 - RNA, 19 nt, Influenza A virus
gagggcuuucaccgaagag

SEQ ID NO: 10298 - RNA, 19 nt, Influenza A virus
aagggcuuucacugaggag

SEQ ID NO: 10299 - RNA, 19 nt, Influenza A virus
aagagcuuucaccgaagag

SEQ ID NO: 10300 - RNA, 19 nt, Influenza A virus
aagggccuucaccgaagag

SEQ ID NO: 10301 - RNA, 19 nt, Influenza A virus
aagggcuaucaccgaagag

SEQ ID NO: 10302 - RNA, 19 nt, Influenza A virus
aagggcuuucacagaagag

SEQ ID NO: 10303 - RNA, 19 nt, Influenza A virus
aagggcuuucaccaaagag

SEQ ID NO: 10304 - RNA, 19 nt, Influenza A virus
aagggcuuucaccgaaaag

SEQ ID NO: 10305 - RNA, 19 nt, Influenza A virus
aagggcuuucaccgaagaa

SEQ ID NO: 10306 - RNA, 19 nt, Influenza A virus
aagggcuuucaccgaagcg

SEQ ID NO: 10307 - RNA, 19 nt, Influenza A virus
aagggguuucaccgaagag

SEQ ID NO: 10308 - RNA, 19 nt, Influenza A virus
uagggcuuucaccgaagag

SEQ ID NO: 10309 - RNA, 19 nt, Influenza A virus
aagggccuucaccgaggag

SEQ ID NO: 10310 - RNA, 19 nt, Influenza A virus
uaagggcuuucaccgagga

SEQ ID NO: 10311 - RNA, 19 nt, Influenza A virus
uaagggcuuucacugaaga

SEQ ID NO: 10312 - RNA, 19 nt, Influenza A virus
uaagggcuuucaucgaaga

SEQ ID NO: 10313 - RNA, 19 nt, Influenza A virus
uaagggcuuuuaccgaaga

SEQ ID NO: 10314 - RNA, 19 nt, Influenza A virus
ugagggcuuucaccgaaga

SEQ ID NO: 10315 - RNA, 19 nt, Influenza A virus
uaagggcuuucacugagga

SEQ ID NO: 10316 - RNA, 19 nt, Influenza A virus
aaagggcuuucaccgaaga

SEQ ID NO: 10317 - RNA, 19 nt, Influenza A virus
uaagagcuuucaccgaaga

SEQ ID NO: 10318 - RNA, 19 nt, Influenza A virus
uaagggccuucaccgaaga

SEQ ID NO: 10319 - RNA, 19 nt, Influenza A virus
uaagggcuaucaccgaaga

SEQ ID NO: 10320 - RNA, 19 nt, Influenza A virus
uaagggcuuucacagaaga

SEQ ID NO: 10321 - RNA, 19 nt, Influenza A virus
uaagggcuuucaccaaaga

SEQ ID NO: 10322 - RNA, 19 nt, Influenza A virus
uaagggcuuucaccgaaaa

SEQ ID NO: 10323 - RNA, 19 nt, Influenza A virus
uaagggcuuucaccgaagc

SEQ ID NO: 10324 - RNA, 19 nt, Influenza A virus
uaagggguuucaccgaaga

SEQ ID NO: 10325 - RNA, 19 nt, Influenza A virus
uuagggcuuucaccgaaga

SEQ ID NO: 10326 - RNA, 19 nt, Influenza A virus
uaagggccuucaccgagga

SEQ ID NO: 10327 - RNA, 19 nt, Influenza A virus
gauggcugauugaagaggu

SEQ ID NO: 10328 - RNA, 19 nt, Influenza A virus
gauggcugauugaggaagu

SEQ ID NO: 10329 - RNA, 19 nt, Influenza A virus
gaugguugauugaagaagu

SEQ ID NO: 10330 - RNA, 19 nt, Influenza A virus
gguggcugauugaagaagu

SEQ ID NO: 10331 - RNA, 19 nt, Influenza A virus
gguggcugauugaggaagu

SEQ ID NO: 10332 - RNA, 19 nt, Influenza A virus
gauggcuaauugaagaagu

SEQ ID NO: 10333 - RNA, 19 nt, Influenza A virus
gauggcugaucgaagaagu

SEQ ID NO: 10334 - RNA, 19 nt, Influenza A virus
gauggcugauugaagaaau

SEQ ID NO: 10335 - RNA, 19 nt, Influenza A virus
  modified_base (1)..(1): a, c, g, u, unknown or other
nauggcugauugaagaagu

SEQ ID NO: 10336 - RNA, 19 nt, Influenza A virus
gaugguuaauugaagaagu

SEQ ID NO: 10337 - RNA, 19 nt, Influenza A virus
ggugguuaauugaagaagu

SEQ ID NO: 10338 - RNA, 19 nt, Influenza A virus
gaugguuaauugaagaaau

SEQ ID NO: 10339 - RNA, 19 nt, Influenza A virus
agauggcugauugaagagg

SEQ ID NO: 10340 - RNA, 19 nt, Influenza A virus
agauggcugauugaggaag

SEQ ID NO: 10341 - RNA, 19 nt, Influenza A virus
agaugguugauugaagaag

SEQ ID NO: 10342 - RNA, 19 nt, Influenza A virus
agguggcugauugaagaag

SEQ ID NO: 10343 - RNA, 19 nt, Influenza A virus
agguggcugauugaggaag

SEQ ID NO: 10344 - RNA, 19 nt, Influenza A virus
agauggcuaauugaagaag

SEQ ID NO: 10345 - RNA, 19 nt, Influenza A virus
agauggcugaucgaagaag

SEQ ID NO: 10346 - RNA, 19 nt, Influenza A virus
agauggcugauugaagaaa

SEQ ID NO: 10347 - RNA, 19 nt, Influenza A virus
  modified_base (2)..(2): a, c, g, u, unknown or other
anauggcugauugaagaag

SEQ ID NO: 10348 - RNA, 19 nt, Influenza A virus
agaugguuaauugaagaag

SEQ ID NO: 10349 - RNA, 19 nt, Influenza A virus
aggugguuaauugaagaag

SEQ ID NO: 10350 - RNA, 19 nt, Influenza A virus
agaugguuaauugaagaaa

SEQ ID NO: 10351 - RNA, 19 nt, Influenza A virus
acuaagggcuuucacugaa

SEQ ID NO: 10352 - RNA, 19 nt, Influenza A virus
acuaagggcuuucaucgaa

SEQ ID NO: 10353 - RNA, 19 nt, Influenza A virus
acuaagggcuuuuaccgaa

SEQ ID NO: 10354 - RNA, 19 nt, Influenza A virus
acugagggcuuucaccgaa

SEQ ID NO: 10355 - RNA, 19 nt, Influenza A virus
auuaagggcuuucaccgaa

SEQ ID NO: 10356 - RNA, 19 nt, Influenza A virus
gcuaagggcuuucaccgaa

SEQ ID NO: 10357 - RNA, 19 nt, Influenza A virus
acuaagggcuuucacugag

SEQ ID NO: 10358 - RNA, 19 nt, Influenza A virus
gcuaagggcuuucaccgag

SEQ ID NO: 10359 - RNA, 19 nt, Influenza A virus
acaaagggcuuucaccgaa

SEQ ID NO: 10360 - RNA, 19 nt, Influenza A virus
acuaagagcuuucaccgaa

SEQ ID NO: 10361 - RNA, 19 nt, Influenza A virus
acuaagggccuucaccgaa

SEQ ID NO: 10362 - RNA, 19 nt, Influenza A virus
acuaagggcuaucaccgaa

SEQ ID NO: 10363 - RNA, 19 nt, Influenza A virus
acuaagggcuuucacagaa

SEQ ID NO: 10364 - RNA, 19 nt, Influenza A virus
acuaagggcuuucaccaaa

SEQ ID NO: 10365 - RNA, 19 nt, Influenza A virus
acuaagggguuucaccgaa

SEQ ID NO: 10366 - RNA, 19 nt, Influenza A virus
acuuagggcuuucaccgaa

SEQ ID NO: 10367 - RNA, 19 nt, Influenza A virus
acuaagggccuucaccgag

SEQ ID NO: 10368 - RNA, 19 nt, Influenza A virus
uacuaagggcuuucacuga

SEQ ID NO: 10369 - RNA, 19 nt, Influenza A virus
uacuaagggcuuucaucga

SEQ ID NO: 10370 - RNA, 19 nt, Influenza A virus
uacuaagggcuuuuaccga

SEQ ID NO: 10371 - RNA, 19 nt, Influenza A virus
uacugagggcuuucaccga

SEQ ID NO: 10372 - RNA, 19 nt, Influenza A virus
uauuaagggcuuucaccga

SEQ ID NO: 10373 - RNA, 19 nt, Influenza A virus
ugcuaagggcuuucaccga

SEQ ID NO: 10374 - RNA, 19 nt, Influenza A virus
cacuaagggcuuucaccga

SEQ ID NO: 10375 - RNA, 19 nt, Influenza A virus
uacaaagggcuuucaccga

SEQ ID NO: 10376 - RNA, 19 nt, Influenza A virus
uacuaagagcuuucaccga

SEQ ID NO: 10377 - RNA, 19 nt, Influenza A virus
uacuaagggccuucaccga

SEQ ID NO: 10378 - RNA, 19 nt, Influenza A virus
uacuaagggcuaucaccga

SEQ ID NO: 10379 - RNA, 19 nt, Influenza A virus
uacuaagggcuuucacaga

SEQ ID NO: 10380 - RNA, 19 nt, Influenza A virus
uacuaagggcuuucaccaa

SEQ ID NO: 10381 - RNA, 19 nt, Influenza A virus
uacuaagggguuucaccga

SEQ ID NO: 10382 - RNA, 19 nt, Influenza A virus
uacuuagggcuuucaccga

SEQ ID NO: 10383 - RNA, 19 nt, Influenza A virus
aaagcgaauuucagugugg

SEQ ID NO: 10384 - RNA, 19 nt, Influenza A virus
aaggcgaauuucaguguga

SEQ ID NO: 10385 - RNA, 19 nt, Influenza A virus
agagcgaauuucaguguga

SEQ ID NO: 10386 - RNA, 19 nt, Influenza A virus
aaagcaaauuucaguguga

SEQ ID NO: 10387 - RNA, 19 nt, Influenza A virus
aaagcgaacuucaguguga

SEQ ID NO: 10388 - RNA, 19 nt, Influenza A virus
aaagcgaauaucaguguga

SEQ ID NO: 10389 - RNA, 19 nt, Influenza A virus
aaagcgaauuucagcguga

SEQ ID NO: 10390 - RNA, 19 nt, Influenza A virus
aaagcgaauuucaguguaa

SEQ ID NO: 10391 - RNA, 19 nt, Influenza A virus
aaagcuaauuucaguguga

SEQ ID NO: 10392 - RNA, 19 nt, Influenza A virus
aaagcaaacuucaguguga

SEQ ID NO: 10393 - RNA, 19 nt, Influenza A virus
aaagcaaacuuuaguguga

SEQ ID NO: 10394 - RNA, 19 nt, Influenza A virus
aagcgaauuucaguguggu

SEQ ID NO: 10395 - RNA, 19 nt, Influenza A virus
aggcgaauuucagugugau

SEQ ID NO: 10396 - RNA, 19 nt, Influenza A virus
gagcgaauuucagugugau

SEQ ID NO: 10397 - RNA, 19 nt, Influenza A virus
aagcaaauuucagugugau

SEQ ID NO: 10398 - RNA, 19 nt, Influenza A virus
aagcgaacuucagugugau

SEQ ID NO: 10399 - RNA, 19 nt, Influenza A virus
aagcgaauaucagugugau

SEQ ID NO: 10400 - RNA, 19 nt, Influenza A virus
aagcgaauuucagcgugau

SEQ ID NO: 10401 - RNA, 19 nt, Influenza A virus
aagcgaauuucaguguaau

SEQ ID NO: 10402 - RNA, 19 nt, Influenza A virus
aagcgaauuucagugugac

SEQ ID NO: 10403 - RNA, 19 nt, Influenza A virus
aagcuaauuucagugugau

SEQ ID NO: 10404 - RNA, 19 nt, Influenza A virus
aagcaaacuucagugugau

SEQ ID NO: 10405 - RNA, 19 nt, Influenza A virus
aagcaaacuuuagugugau

SEQ ID NO: 10406 - RNA, 19 nt, Influenza A virus
ggcuuucaccgaagagggg

SEQ ID NO: 10407 - RNA, 19 nt, Influenza A virus
ggcuuucaccgaggaggga

SEQ ID NO: 10408 - RNA, 19 nt, Influenza A virus
ggcuuucacugaagaggga

SEQ ID NO: 10409 - RNA, 19 nt, Influenza A virus
ggcuuucaucgaagaggga

SEQ ID NO: 10410 - RNA, 19 nt, Influenza A virus
ggcuuuuaccgaagaggga

SEQ ID NO: 10411 - RNA, 19 nt, Influenza A virus
ggcuuucacugaggaggga

SEQ ID NO: 10412 - RNA, 19 nt, Influenza A virus
agcuuucaccgaagaggga

SEQ ID NO: 10413 - RNA, 19 nt, Influenza A virus
ggccuucaccgaagaggga

SEQ ID NO: 10414 - RNA, 19 nt, Influenza A virus
ggcuaucaccgaagaggga

SEQ ID NO: 10415 - RNA, 19 nt, Influenza A virus
ggcuuucacagaagaggga

SEQ ID NO: 10416 - RNA, 19 nt, Influenza A virus
ggcuuucaccaaagaggga

SEQ ID NO: 10417 - RNA, 19 nt, Influenza A virus
ggcuuucaccgaaaaggga

SEQ ID NO: 10418 - RNA, 19 nt, Influenza A virus
ggcuuucaccgaagaagga

SEQ ID NO: 10419 - RNA, 19 nt, Influenza A virus
ggcuuucaccgaagaggaa

SEQ ID NO: 10420 - RNA, 19 nt, Influenza A virus
ggcuuucaccgaagagggc

SEQ ID NO: 10421 - RNA, 19 nt, Influenza A virus
ggcuuucaccgaagcggga

SEQ ID NO: 10422 - RNA, 19 nt, Influenza A virus
ggguuucaccgaagaggga

SEQ ID NO: 10423 - RNA, 19 nt, Influenza A virus
ggccuucaccgaagagggg

SEQ ID NO: 10424 - RNA, 19 nt, Influenza A virus
ggccuucaccgaggaggga

SEQ ID NO: 10425 - RNA, 19 nt, Influenza A virus
gcuuucaccgaagaggggg

SEQ ID NO: 10426 - RNA, 19 nt, Influenza A virus
gcuuucaccgaggagggag

SEQ ID NO: 10427 - RNA, 19 nt, Influenza A virus
gcuuucacugaagagggag

SEQ ID NO: 10428 - RNA, 19 nt, Influenza A virus
gcuuucaucgaagagggag

SEQ ID NO: 10429 - RNA, 19 nt, Influenza A virus
gcuuuuaccgaagagggag

SEQ ID NO: 10430 - RNA, 19 nt, Influenza A virus
gcuuucacugaggagggag

SEQ ID NO: 10431 - RNA, 19 nt, Influenza A virus
gccuucaccgaagagggag

SEQ ID NO: 10432 - RNA, 19 nt, Influenza A virus
gcuaucaccgaagagggag

SEQ ID NO: 10433 - RNA, 19 nt, Influenza A virus
gcuuucacagaagagggag

SEQ ID NO: 10434 - RNA, 19 nt, Influenza A virus
gcuuucaccaaagagggag

SEQ ID NO: 10435 - RNA, 19 nt, Influenza A virus
gcuuucaccgaaaagggag

SEQ ID NO: 10436 - RNA, 19 nt, Influenza A virus
gcuuucaccgaagaaggag

SEQ ID NO: 10437 - RNA, 19 nt, Influenza A virus
gcuuucaccgaagaggaag

SEQ ID NO: 10438 - RNA, 19 nt, Influenza A virus
gcuuucaccgaagagggaa

SEQ ID NO: 10439 - RNA, 19 nt, Influenza A virus
gcuuucaccgaagagggac

SEQ ID NO: 10440 - RNA, 19 nt, Influenza A virus
gcuuucaccgaagagggcg

SEQ ID NO: 10441 - RNA, 19 nt, Influenza A virus
gcuuucaccgaagcgggag

SEQ ID NO: 10442 - RNA, 19 nt, Influenza A virus
gguuucaccgaagagggag

SEQ ID NO: 10443 - RNA, 19 nt, Influenza A virus
gccuucaccgaggagggag

SEQ ID NO: 10444 - RNA, 19 nt, Influenza A virus
gccuucaccgaagagggaa

SEQ ID NO: 10445 - RNA, 19 nt, Influenza A virus
gcuuucacagaagaaggag

SEQ ID NO: 10446 - RNA, 19 nt, Influenza A virus
gccuucaccgaagagggga

SEQ ID NO: 10447 - RNA, 19 nt, Influenza A virus
gcuuucacagaagaagggg

SEQ ID NO: 10448 - RNA, 19 nt, Influenza A virus
gcuuucacggaagaagggg

SEQ ID NO: 10449 - RNA, 19 nt, Influenza A virus
auuacuaagggcuuucacu

SEQ ID NO: 10450 - RNA, 19 nt, Influenza A virus
auuacuaagggcuuucauc

SEQ ID NO: 10451 - RNA, 19 nt, Influenza A virus
auuacuaagggcuuuuacc

SEQ ID NO: 10452 - RNA, 19 nt, Influenza A virus
auuacugagggcuuucacc

SEQ ID NO: 10453 - RNA, 19 nt, Influenza A virus
auuauuaagggcuuucacc

SEQ ID NO: 10454 - RNA, 19 nt, Influenza A virus
auugcuaagggcuuucacc

SEQ ID NO: 10455 - RNA, 19 nt, Influenza A virus
acuacuaagggcuuucacc

SEQ ID NO: 10456 - RNA, 19 nt, Influenza A virus
aucacuaagggcuuucacc

SEQ ID NO: 10457 - RNA, 19 nt, Influenza A virus
auuacaaagggcuuucacc

SEQ ID NO: 10458 - RNA, 19 nt, Influenza A virus
auuacuaagagcuuucacc

SEQ ID NO: 10459 - RNA, 19 nt, Influenza A virus
auuacuaagggccuucacc

SEQ ID NO: 10460 - RNA, 19 nt, Influenza A virus
auuacuaagggcuaucacc

SEQ ID NO: 10461 - RNA, 19 nt, Influenza A virus
auuacuaagggcuuucaca

SEQ ID NO: 10462 - RNA, 19 nt, Influenza A virus
auuacuaagggguuucacc

SEQ ID NO: 10463 - RNA, 19 nt, Influenza A virus
auuacuuagggcuuucacc

SEQ ID NO: 10464 - RNA, 19 nt, Influenza A virus
uuuacuaagggcuuucacc

SEQ ID NO: 10465 - RNA, 19 nt, Influenza A virus
acuacuaagggcuuucacu

SEQ ID NO: 10466 - RNA, 19 nt, Influenza A virus
uuacuaagggcuuucacug

SEQ ID NO: 10467 - RNA, 19 nt, Influenza A virus
uuacuaagggcuuucaucg

SEQ ID NO: 10468 - RNA, 19 nt, Influenza A virus
uuacuaagggcuuuuaccg

SEQ ID NO: 10469 - RNA, 19 nt, Influenza A virus
uuacugagggcuuucaccg

SEQ ID NO: 10470 - RNA, 19 nt, Influenza A virus
uuauuaagggcuuucaccg

SEQ ID NO: 10471 - RNA, 19 nt, Influenza A virus
uugcuaagggcuuucaccg

SEQ ID NO: 10472 - RNA, 19 nt, Influenza A virus
cuacuaagggcuuucaccg

SEQ ID NO: 10473 - RNA, 19 nt, Influenza A virus
ucacuaagggcuuucaccg

SEQ ID NO: 10474 - RNA, 19 nt, Influenza A virus
uuacaaagggcuuucaccg

SEQ ID NO: 10475 - RNA, 19 nt, Influenza A virus
uuacuaagagcuuucaccg

SEQ ID NO: 10476 - RNA, 19 nt, Influenza A virus
uuacuaagggccuucaccg

SEQ ID NO: 10477 - RNA, 19 nt, Influenza A virus
uuacuaagggcuaucaccg

SEQ ID NO: 10478 - RNA, 19 nt, Influenza A virus
uuacuaagggcuuucacag

SEQ ID NO: 10479 - RNA, 19 nt, Influenza A virus
uuacuaagggcuuucacca

SEQ ID NO: 10480 - RNA, 19 nt, Influenza A virus
uuacuaagggguuucaccg

SEQ ID NO: 10481 - RNA, 19 nt, Influenza A virus
uuacuuagggcuuucaccg

SEQ ID NO: 10482 - RNA, 19 nt, Influenza A virus
cuacuaagggcuuucacug

SEQ ID NO: 10483 - RNA, 19 nt, Influenza A virus
aagagggagcaguuguugg

SEQ ID NO: 10484 - RNA, 19 nt, Influenza A virus
aagagggaguaauuguugg

SEQ ID NO: 10485 - RNA, 19 nt, Influenza A virus
aagagggggcaauuguugg

SEQ ID NO: 10486 - RNA, 19 nt, Influenza A virus
aggagggagcaauuguugg

SEQ ID NO: 10487 - RNA, 19 nt, Influenza A virus
aaaagggagcaauuguugg

SEQ ID NO: 10488 - RNA, 19 nt, Influenza A virus
aagaaggagcaauuguugg

SEQ ID NO: 10489 - RNA, 19 nt, Influenza A virus
aagaggaagcaauuguugg

SEQ ID NO: 10490 - RNA, 19 nt, Influenza A virus
aagagggaacaauuguugg

SEQ ID NO: 10491 - RNA, 19 nt, Influenza A virus
aagagggagcaaucguugg

SEQ ID NO: 10492 - RNA, 19 nt, Influenza A virus
aagagggagcaauuauugg

SEQ ID NO: 10493 - RNA, 19 nt, Influenza A virus
aagagggagcaauuguagg

SEQ ID NO: 10494 - RNA, 19 nt, Influenza A virus
aagagggagcaauuguugc

SEQ ID NO: 10495 - RNA, 19 nt, Influenza A virus
aagagggcgcaauuguugg

SEQ ID NO: 10496 - RNA, 19 nt, Influenza A virus
aagcgggagcaauuguugg

SEQ ID NO: 10497 - RNA, 19 nt, Influenza A virus
aagaggggacaauuguugg

SEQ ID NO: 10498 - RNA, 19 nt, Influenza A virus
aggagggagcaaucguugg

SEQ ID NO: 10499 - RNA, 19 nt, Influenza A virus
aagagggacgaauuguugg

SEQ ID NO: 10500 - RNA, 19 nt, Influenza A virus
aagaaggggcaauuguagg

SEQ ID NO: 10501 - RNA, 19 nt, Influenza A virus
gaagagggagcaguuguug

SEQ ID NO: 10502 - RNA, 19 nt, Influenza A virus
gaagagggaguaauuguug

SEQ ID NO: 10503 - RNA, 19 nt, Influenza A virus
gaagagggggcaauuguug

SEQ ID NO: 10504 - RNA, 19 nt, Influenza A virus
gaggagggagcaauuguug

SEQ ID NO: 10505 - RNA, 19 nt, Influenza A virus
aaagagggagcaauuguug

SEQ ID NO: 10506 - RNA, 19 nt, Influenza A virus
gaaaagggagcaauuguug

SEQ ID NO: 10507 - RNA, 19 nt, Influenza A virus
gaagaaggagcaauuguug

SEQ ID NO: 10508 - RNA, 19 nt, Influenza A virus
gaagaggaagcaauuguug

SEQ ID NO: 10509 - RNA, 19 nt, Influenza A virus
gaagagggaacaauuguug

SEQ ID NO: 10510 - RNA, 19 nt, Influenza A virus
gaagagggagcaaucguug

SEQ ID NO: 10511 - RNA, 19 nt, Influenza A virus
gaagagggagcaauuauug

SEQ ID NO: 10512 - RNA, 19 nt, Influenza A virus
gaagagggagcaauuguag

SEQ ID NO: 10513 - RNA, 19 nt, Influenza A virus
gaagagggcgcaauuguug

SEQ ID NO: 10514 - RNA, 19 nt, Influenza A virus
gaagcgggagcaauuguug

SEQ ID NO: 10515 - RNA, 19 nt, Influenza A virus
gaagaggggacaauuguug

SEQ ID NO: 10516 - RNA, 19 nt, Influenza A virus
gaggagggagcaaucguug

SEQ ID NO: 10517 - RNA, 19 nt, Influenza A virus
gaagagggacgaauuguug

SEQ ID NO: 10518 - RNA, 19 nt, Influenza A virus
gaagaaggggcaauuguag

SEQ ID NO: 10519 - RNA, 19 nt, Influenza A virus
agagggagcaauuguuggu

SEQ ID NO: 10520 - RNA, 19 nt, Influenza A virus
agagggagcaguuguuggc

SEQ ID NO: 10521 - RNA, 19 nt, Influenza A virus
agagggaguaauuguuggc

SEQ ID NO: 10522 - RNA, 19 nt, Influenza A virus
agagggggcaauuguuggc

SEQ ID NO: 10523 - RNA, 19 nt, Influenza A virus
ggagggagcaauuguuggc

SEQ ID NO: 10524 - RNA, 19 nt, Influenza A virus
aaagggagcaauuguuggc

SEQ ID NO: 10525 - RNA, 19 nt, Influenza A virus
agaaggagcaauuguuggc

SEQ ID NO: 10526 - RNA, 19 nt, Influenza A virus
agaggaagcaauuguuggc

SEQ ID NO: 10527 - RNA, 19 nt, Influenza A virus
agagggaacaauuguuggc

SEQ ID NO: 10528 - RNA, 19 nt, Influenza A virus
agagggagcaauuauuggc

SEQ ID NO: 10529 - RNA, 19 nt, Influenza A virus
agagggagcaauuguaggc

SEQ ID NO: 10530 - RNA, 19 nt, Influenza A virus
agagggagcaauuguugcc

SEQ ID NO: 10531 - RNA, 19 nt, Influenza A virus
agagggcgcaauuguuggc

SEQ ID NO: 10532 - RNA, 19 nt, Influenza A virus
agcgggagcaauuguuggc

SEQ ID NO: 10533 - RNA, 19 nt, Influenza A virus
agagggaacaauuguuggu

SEQ ID NO: 10534 - RNA, 19 nt, Influenza A virus
agaggggacaauuguuggc

SEQ ID NO: 10535 - RNA, 19 nt, Influenza A virus
agagggacgaauuguuggc

SEQ ID NO: 10536 - RNA, 19 nt, Influenza A virus
agagggagcaaucguugga

SEQ ID NO: 10537 - RNA, 19 nt, Influenza A virus
agaaggggcaauuguaggc

SEQ ID NO: 10538 - RNA, 19 nt, Influenza A virus
ggagggagcaaucguugga

SEQ ID NO: 10539 - RNA, 19 nt, Influenza A virus
ucaccgaagagggagcagu

SEQ ID NO: 10540 - RNA, 19 nt, Influenza A virus
ucaccgaagagggaguaau

SEQ ID NO: 10541 - RNA, 19 nt, Influenza A virus
ucaccgaagagggggcaau

SEQ ID NO: 10542 - RNA, 19 nt, Influenza A virus
ucaccgaggagggagcaau

SEQ ID NO: 10543 - RNA, 19 nt, Influenza A virus
ucacugaagagggagcaau

SEQ ID NO: 10544 - RNA, 19 nt, Influenza A virus
ucaucgaagagggagcaau

SEQ ID NO: 10545 - RNA, 19 nt, Influenza A virus
uuaccgaagagggagcaau

SEQ ID NO: 10546 - RNA, 19 nt, Influenza A virus
ucacugaggagggagcaau

SEQ ID NO: 10547 - RNA, 19 nt, Influenza A virus
ucacagaagagggagcaau

SEQ ID NO: 10548 - RNA, 19 nt, Influenza A virus
ucaccaaagagggagcaau

SEQ ID NO: 10549 - RNA, 19 nt, Influenza A virus
ucaccgaaaagggagcaau

SEQ ID NO: 10550 - RNA, 19 nt, Influenza A virus
ucaccgaagaaggagcaau

SEQ ID NO: 10551 - RNA, 19 nt, Influenza A virus
ucaccgaagaggaagcaau

SEQ ID NO: 10552 - RNA, 19 nt, Influenza A virus
ucaccgaagagggaacaau

SEQ ID NO: 10553 - RNA, 19 nt, Influenza A virus
ucaccgaagagggcgcaau

SEQ ID NO: 10554 - RNA, 19 nt, Influenza A virus
ucaccgaagcgggagcaau

SEQ ID NO: 10555 - RNA, 19 nt, Influenza A virus
ucaccgaagaggggacaau

SEQ ID NO: 10556 - RNA, 19 nt, Influenza A virus
ucacagaagaaggagcaau

SEQ ID NO: 10557 - RNA, 19 nt, Influenza A virus
ucaccgaagagggacgaau

SEQ ID NO: 10558 - RNA, 19 nt, Influenza A virus
ucacagaagaaggggcaau

SEQ ID NO: 10559 - RNA, 19 nt, Influenza A virus
ucacggaagaaggggcaau

SEQ ID NO: 10560 - RNA, 19 nt, Influenza A virus
uuucaccgaagagggagua

SEQ ID NO: 10561 - RNA, 19 nt, Influenza A virus
uuucaccgaagagggggca

SEQ ID NO: 10562 - RNA, 19 nt, Influenza A virus
uuucaccgaggagggagca

SEQ ID NO: 10563 - RNA, 19 nt, Influenza A virus
uuucacugaagagggagca

SEQ ID NO: 10564 - RNA, 19 nt, Influenza A virus
uuucaucgaagagggagca

SEQ ID NO: 10565 - RNA, 19 nt, Influenza A virus
uuuuaccgaagagggagca

SEQ ID NO: 10566 - RNA, 19 nt, Influenza A virus
uuucacugaggagggagca

SEQ ID NO: 10567 - RNA, 19 nt, Influenza A virus
cuucaccgaagagggagca

SEQ ID NO: 10568 - RNA, 19 nt, Influenza A virus
uaucaccgaagagggagca

SEQ ID NO: 10569 - RNA, 19 nt, Influenza A virus
uuucacagaagagggagca

SEQ ID NO: 10570 - RNA, 19 nt, Influenza A virus
uuucaccaaagagggagca

SEQ ID NO: 10571 - RNA, 19 nt, Influenza A virus
uuucaccgaaaagggagca

SEQ ID NO: 10572 - RNA, 19 nt, Influenza A virus
uuucaccgaagaaggagca

SEQ ID NO: 10573 - RNA, 19 nt, Influenza A virus
uuucaccgaagaggaagca

SEQ ID NO: 10574 - RNA, 19 nt, Influenza A virus
uuucaccgaagagggaaca

SEQ ID NO: 10575 - RNA, 19 nt, Influenza A virus
uuucaccgaagagggcgca

SEQ ID NO: 10576 - RNA, 19 nt, Influenza A virus
uuucaccgaagcgggagca

SEQ ID NO: 10577 - RNA, 19 nt, Influenza A virus
cuucaccgaggagggagca

SEQ ID NO: 10578 - RNA, 19 nt, Influenza A virus
cuucaccgaagagggaaca

SEQ ID NO: 10579 - RNA, 19 nt, Influenza A virus
uuucacagaagaaggagca

SEQ ID NO: 10580 - RNA, 19 nt, Influenza A virus
uuucaccgaagagggacga

SEQ ID NO: 10581 - RNA, 19 nt, Influenza A virus
cuucaccgaagaggggaca

SEQ ID NO: 10582 - RNA, 19 nt, Influenza A virus
uuucacagaagaaggggca

SEQ ID NO: 10583 - RNA, 19 nt, Influenza A virus
uuucacggaagaaggggca

SEQ ID NO: 10584 - RNA, 19 nt, Influenza A virus
uucaccgaagagggagcag

SEQ ID NO: 10585 - RNA, 19 nt, Influenza A virus
uucaccgaagagggaguaa

SEQ ID NO: 10586 - RNA, 19 nt, Influenza A virus
uucaccgaagagggggcaa

SEQ ID NO: 10587 - RNA, 19 nt, Influenza A virus
uucaccgaggagggagcaa

SEQ ID NO: 10588 - RNA, 19 nt, Influenza A virus
uucacugaagagggagcaa

SEQ ID NO: 10589 - RNA, 19 nt, Influenza A virus
uucaucgaagagggagcaa

SEQ ID NO: 10590 - RNA, 19 nt, Influenza A virus
uuuaccgaagagggagcaa

SEQ ID NO: 10591 - RNA, 19 nt, Influenza A virus
uucacugaggagggagcaa

SEQ ID NO: 10592 - RNA, 19 nt, Influenza A virus
aucaccgaagagggagcaa

SEQ ID NO: 10593 - RNA, 19 nt, Influenza A virus
uucacagaagagggagcaa

SEQ ID NO: 10594 - RNA, 19 nt, Influenza A virus
uucaccaaagagggagcaa

SEQ ID NO: 10595 - RNA, 19 nt, Influenza A virus
uucaccgaaaagggagcaa

SEQ ID NO: 10596 - RNA, 19 nt, Influenza A virus
uucaccgaagaaggagcaa

SEQ ID NO: 10597 - RNA, 19 nt, Influenza A virus
uucaccgaagaggaagcaa

SEQ ID NO: 10598 - RNA, 19 nt, Influenza A virus
uucaccgaagagggaacaa

SEQ ID NO: 10599 - RNA, 19 nt, Influenza A virus
uucaccgaagagggcgcaa

SEQ ID NO: 10600 - RNA, 19 nt, Influenza A virus
uucaccgaagcgggagcaa

SEQ ID NO: 10601 - RNA, 19 nt, Influenza A virus
uucaccgaagaggggacaa

SEQ ID NO: 10602 - RNA, 19 nt, Influenza A virus
uucacagaagaaggagcaa

SEQ ID NO: 10603 - RNA, 19 nt, Influenza A virus
uucaccgaagagggacgaa

SEQ ID NO: 10604 - RNA, 19 nt, Influenza A virus
uucacagaagaaggggcaa

SEQ ID NO: 10605 - RNA, 19 nt, Influenza A virus
uucacggaagaaggggcaa

SEQ ID NO: 10606 - RNA, 19 nt, Influenza A virus
cuuucaccgaagagggagu

SEQ ID NO: 10607 - RNA, 19 nt, Influenza A virus
cuuucaccgaagagggggc

SEQ ID NO: 10608 - RNA, 19 nt, Influenza A virus
cuuucaccgaggagggagc

SEQ ID NO: 10609 - RNA, 19 nt, Influenza A virus
cuuucacugaagagggagc

SEQ ID NO: 10610 - RNA, 19 nt, Influenza A virus
cuuucaucgaagagggagc

SEQ ID NO: 10611 - RNA, 19 nt, Influenza A virus
cuuuuaccgaagagggagc

SEQ ID NO: 10612 - RNA, 19 nt, Influenza A virus
cuuucacugaggagggagc

SEQ ID NO: 10613 - RNA, 19 nt, Influenza A virus
ccuucaccgaagagggagc

SEQ ID NO: 10614 - RNA, 19 nt, Influenza A virus
cuaucaccgaagagggagc

SEQ ID NO: 10615 - RNA, 19 nt, Influenza A virus
cuuucacagaagagggagc

SEQ ID NO: 10616 - RNA, 19 nt, Influenza A virus
cuuucaccaaagagggagc

SEQ ID NO: 10617 - RNA, 19 nt, Influenza A virus
cuuucaccgaaaagggagc

SEQ ID NO: 10618 - RNA, 19 nt, Influenza A virus
cuuucaccgaagaaggagc

SEQ ID NO: 10619 - RNA, 19 nt, Influenza A virus
cuuucaccgaagaggaagc

SEQ ID NO: 10620 - RNA, 19 nt, Influenza A virus
cuuucaccgaagagggaac

SEQ ID NO: 10621 - RNA, 19 nt, Influenza A virus
cuuucaccgaagagggcgc

SEQ ID NO: 10622 - RNA, 19 nt, Influenza A virus
cuuucaccgaagcgggagc

SEQ ID NO: 10623 - RNA, 19 nt, Influenza A virus
guuucaccgaagagggagc

SEQ ID NO: 10624 - RNA, 19 nt, Influenza A virus
ccuucaccgaggagggagc

SEQ ID NO: 10625 - RNA, 19 nt, Influenza A virus
ccuucaccgaagagggaac

SEQ ID NO: 10626 - RNA, 19 nt, Influenza A virus
cuuucacagaagaaggagc

SEQ ID NO: 10627 - RNA, 19 nt, Influenza A virus
cuuucaccgaagagggacg

SEQ ID NO: 10628 - RNA, 19 nt, Influenza A virus
ccuucaccgaagaggggac

SEQ ID NO: 10629 - RNA, 19 nt, Influenza A virus
cuuucacagaagaaggggc

SEQ ID NO: 10630 - RNA, 19 nt, Influenza A virus
cuuucacggaagaaggggc

SEQ ID NO: 10631 - RNA, 19 nt, Influenza A virus
ccgaagagggagcaguugu

SEQ ID NO: 10632 - RNA, 19 nt, Influenza A virus
ccgaagagggaguaauugu

SEQ ID NO: 10633 - RNA, 19 nt, Influenza A virus
ccgaagagggggcaauugu

SEQ ID NO: 10634 - RNA, 19 nt, Influenza A virus
ccgaggagggagcaauugu

SEQ ID NO: 10635 - RNA, 19 nt, Influenza A virus
cugaagagggagcaauugu

SEQ ID NO: 10636 - RNA, 19 nt, Influenza A virus
ucgaagagggagcaauugu

SEQ ID NO: 10637 - RNA, 19 nt, Influenza A virus
cagaagagggagcaauugu

SEQ ID NO: 10638 - RNA, 19 nt, Influenza A virus
ccaaagagggagcaauugu

SEQ ID NO: 10639 - RNA, 19 nt, Influenza A virus
ccgaaaagggagcaauugu

SEQ ID NO: 10640 - RNA, 19 nt, Influenza A virus
ccgaagaaggagcaauugu

SEQ ID NO: 10641 - RNA, 19 nt, Influenza A virus
ccgaagaggaagcaauugu

SEQ ID NO: 10642 - RNA, 19 nt, Influenza A virus
ccgaagagggaacaauugu

SEQ ID NO: 10643 - RNA, 19 nt, Influenza A virus
ccgaagagggagcaaucgu

SEQ ID NO: 10644 - RNA, 19 nt, Influenza A virus
ccgaagagggagcaauuau

SEQ ID NO: 10645 - RNA, 19 nt, Influenza A virus
ccgaagagggcgcaauugu

SEQ ID NO: 10646 - RNA, 19 nt, Influenza A virus
ccgaagcgggagcaauugu

SEQ ID NO: 10647 - RNA, 19 nt, Influenza A virus
ccgaagaggggacaauugu

SEQ ID NO: 10648 - RNA, 19 nt, Influenza A virus
cugaggagggagcaaucgu

SEQ ID NO: 10649 - RNA, 19 nt, Influenza A virus
ccgaagagggacgaauugu

SEQ ID NO: 10650 - RNA, 19 nt, Influenza A virus
cggaagaaggggcaauugu

SEQ ID NO: 10651 - RNA, 19 nt, Influenza A virus
accgaagagggagcaguug

SEQ ID NO: 10652 - RNA, 19 nt, Influenza A virus
accgaagagggaguaauug

SEQ ID NO: 10653 - RNA, 19 nt, Influenza A virus
accgaagagggggcaauug

SEQ ID NO: 10654 - RNA, 19 nt, Influenza A virus
accgaggagggagcaauug

SEQ ID NO: 10655 - RNA, 19 nt, Influenza A virus
acugaagagggagcaauug

SEQ ID NO: 10656 - RNA, 19 nt, Influenza A virus
aucgaagagggagcaauug

SEQ ID NO: 10657 - RNA, 19 nt, Influenza A virus
acagaagagggagcaauug

SEQ ID NO: 10658 - RNA, 19 nt, Influenza A virus
accaaagagggagcaauug

SEQ ID NO: 10659 - RNA, 19 nt, Influenza A virus
accgaaaagggagcaauug

SEQ ID NO: 10660 - RNA, 19 nt, Influenza A virus
accgaagaaggagcaauug

SEQ ID NO: 10661 - RNA, 19 nt, Influenza A virus
accgaagaggaagcaauug

SEQ ID NO: 10662 - RNA, 19 nt, Influenza A virus
accgaagagggaacaauug

SEQ ID NO: 10663 - RNA, 19 nt, Influenza A virus
accgaagagggagcaaucg

SEQ ID NO: 10664 - RNA, 19 nt, Influenza A virus
accgaagagggagcaauua

SEQ ID NO: 10665 - RNA, 19 nt, Influenza A virus
accgaagagggcgcaauug

SEQ ID NO: 10666 - RNA, 19 nt, Influenza A virus
accgaagcgggagcaauug

SEQ ID NO: 10667 - RNA, 19 nt, Influenza A virus
accgaagaggggacaauug

SEQ ID NO: 10668 - RNA, 19 nt, Influenza A virus
acugaggagggagcaaucg

SEQ ID NO: 10669 - RNA, 19 nt, Influenza A virus
accgaagagggacgaauug

SEQ ID NO: 10670 - RNA, 19 nt, Influenza A virus
acggaagaaggggcaauug

SEQ ID NO: 10671 - RNA, 19 nt, Influenza A virus
cgaagagggagcaguuguu

SEQ ID NO: 10672 - RNA, 19 nt, Influenza A virus
cgaagagggaguaauuguu

SEQ ID NO: 10673 - RNA, 19 nt, Influenza A virus
cgaagagggggcaauuguu

SEQ ID NO: 10674 - RNA, 19 nt, Influenza A virus
cgaggagggagcaauuguu

SEQ ID NO: 10675 - RNA, 19 nt, Influenza A virus
ugaagagggagcaauuguu

SEQ ID NO: 10676 - RNA, 19 nt, Influenza A virus
agaagagggagcaauuguu

SEQ ID NO: 10677 - RNA, 19 nt, Influenza A virus
caaagagggagcaauuguu

SEQ ID NO: 10678 - RNA, 19 nt, Influenza A virus
cgaaaagggagcaauuguu

SEQ ID NO: 10679 - RNA, 19 nt, Influenza A virus
cgaagaaggagcaauuguu

SEQ ID NO: 10680 - RNA, 19 nt, Influenza A virus
cgaagaggaagcaauuguu

SEQ ID NO: 10681 - RNA, 19 nt, Influenza A virus
cgaagagggaacaauuguu

SEQ ID NO: 10682 - RNA, 19 nt, Influenza A virus
cgaagagggagcaaucguu

SEQ ID NO: 10683 - RNA, 19 nt, Influenza A virus
cgaagagggagcaauuauu

SEQ ID NO: 10684 - RNA, 19 nt, Influenza A virus
cgaagagggagcaauugua

SEQ ID NO: 10685 - RNA, 19 nt, Influenza A virus
cgaagagggcgcaauuguu

SEQ ID NO: 10686 - RNA, 19 nt, Influenza A virus
cgaagcgggagcaauuguu

SEQ ID NO: 10687 - RNA, 19 nt, Influenza A virus
cgaagaggggacaauuguu

SEQ ID NO: 10688 - RNA, 19 nt, Influenza A virus
ugaggagggagcaaucguu

SEQ ID NO: 10689 - RNA, 19 nt, Influenza A virus
cgaagagggacgaauuguu

SEQ ID NO: 10690 - RNA, 19 nt, Influenza A virus
caccgaagagggagcaguu

SEQ ID NO: 10691 - RNA, 19 nt, Influenza A virus
caccgaagagggaguaauu

SEQ ID NO: 10692 - RNA, 19 nt, Influenza A virus
caccgaagagggggcaauu

SEQ ID NO: 10693 - RNA, 19 nt, Influenza A virus
caccgaggagggagcaauu

SEQ ID NO: 10694 - RNA, 19 nt, Influenza A virus
cacugaagagggagcaauu

SEQ ID NO: 10695 - RNA, 19 nt, Influenza A virus
caucgaagagggagcaauu

SEQ ID NO: 10696 - RNA, 19 nt, Influenza A virus
uaccgaagagggagcaauu

SEQ ID NO: 10697 - RNA, 19 nt, Influenza A virus
cacagaagagggagcaauu

SEQ ID NO: 10698 - RNA, 19 nt, Influenza A virus
caccaaagagggagcaauu

SEQ ID NO: 10699 - RNA, 19 nt, Influenza A virus
caccgaaaagggagcaauu

SEQ ID NO: 10700 - RNA, 19 nt, Influenza A virus
caccgaagaaggagcaauu

SEQ ID NO: 10701 - RNA, 19 nt, Influenza A virus
caccgaagaggaagcaauu

SEQ ID NO: 10702 - RNA, 19 nt, Influenza A virus
caccgaagagggaacaauu

SEQ ID NO: 10703 - RNA, 19 nt, Influenza A virus
caccgaagagggagcaauc

SEQ ID NO: 10704 - RNA, 19 nt, Influenza A virus
caccgaagagggcgcaauu

SEQ ID NO: 10705 - RNA, 19 nt, Influenza A virus
caccgaagcgggagcaauu

SEQ ID NO: 10706 - RNA, 19 nt, Influenza A virus
caccgaagaggggacaauu

SEQ ID NO: 10707 - RNA, 19 nt, Influenza A virus
cacugaggagggagcaauc

SEQ ID NO: 10708 - RNA, 19 nt, Influenza A virus
caccgaagagggacgaauu

SEQ ID NO: 10709 - RNA, 19 nt, Influenza A virus
cacggaagaaggggcaauu

SEQ ID NO: 10710 - DNA, 21 bp, Artificial Sequence
  Description of Combined DNA/RNA Molecule: Synthetic oligonucleotide
  Description of Artificial Sequence: Synthetic oligonucleotide
ggagacgugguguugguaatt

SEQ ID NO: 10711 - DNA, 21 bp, Artificial Sequence
  Description of Combined DNA/RNA Molecule: Synthetic oligonucleotide
  Description of Artificial Sequence: Synthetic oligonucleotide
uuaccaacaccacgucucctt

SEQ ID NO: 10712 - DNA, 21 bp, Artificial Sequence
  Description of Combined DNA/RNA Molecule: Synthetic oligonucleotide
  Description of Artificial Sequence: Synthetic oligonucleotide
cgggacucuagcauacuuatt

SEQ ID NO: 10713 - DNA, 21 bp, Artificial Sequence
  Description of Combined DNA/RNA Molecule: Synthetic oligonucleotide
  Description of Artificial Sequence: Synthetic oligonucleotide
uaaguaugcuagagucccgtt

SEQ ID NO: 10714 - DNA, 21 bp, Artificial Sequence
  Description of Combined DNA/RNA Molecule: Synthetic oligonucleotide
  Description of Artificial Sequence: Synthetic oligonucleotide
gcaggcaaaccauuugaautt

SEQ ID NO: 10715 - DNA, 21 bp, Artificial Sequence
  Description of Combined DNA/RNA Molecule: Synthetic oligonucleotide
  Description of Artificial Sequence: Synthetic oligonucleotide
auucaaaugguuugccugctt

SEQ ID NO: 10716 - DNA, 21 bp, Artificial Sequence
  Description of Combined DNA/RNA Molecule: Synthetic oligonucleotide
  Description of Artificial Sequence: Synthetic oligonucleotide
caggauacaccauggauactt

SEQ ID NO: 10717 - DNA, 21 bp, Artificial Sequence
  Description of Combined DNA/RNA Molecule: Synthetic oligonucleotide
  Description of Artificial Sequence: Synthetic oligonucleotide
guauccaugguguauccugtt

SEQ ID NO: 10718 - DNA, 21 bp, Artificial Sequence
  Description of Combined DNA/RNA Molecule: Synthetic oligonucleotide
  Description of Artificial Sequence: Synthetic oligonucleotide
gaucuguuccaccauugaatt

SEQ ID NO: 10719 - DNA, 21 bp, Artificial Sequence
  Description of Combined DNA/RNA Molecule: Synthetic oligonucleotide
  Description of Artificial Sequence: Synthetic oligonucleotide
uucaaugguggaacagauctt

SEQ ID NO: 10720 - DNA, 21 bp, Artificial Sequence
  Description of Combined DNA/RNA Molecule: Synthetic oligonucleotide
  Description of Artificial Sequence: Synthetic oligonucleotide
ugcuucaauccgaugauugtt

SEQ ID NO: 10721 - DNA, 21 bp, Artificial Sequence
  Description of Combined DNA/RNA Molecule: Synthetic oligonucleotide
  Description of Artificial Sequence: Synthetic oligonucleotide
caaucaucggauugaagcatt

SEQ ID NO: 10722 - DNA, 21 bp, Artificial Sequence
  Description of Combined DNA/RNA Molecule: Synthetic oligonucleotide
  Description of Artificial Sequence: Synthetic oligonucleotide
cggcuacauugagggcaagtt

SEQ ID NO: 10723 - DNA, 21 bp, Artificial Sequence
  Description of Combined DNA/RNA Molecule: Synthetic oligonucleotide
  Description of Artificial Sequence: Synthetic oligonucleotide
cuugcccucaauguagccgtt

SEQ ID NO: 10724 - DNA, 21 bp, Artificial Sequence
  Description of Combined DNA/RNA Molecule: Synthetic oligonucleotide
  Description of Artificial Sequence: Synthetic oligonucleotide
gcaauugaggagugccugatt

SEQ ID NO: 10725 - DNA, 21 bp, Artificial Sequence
  Description of Combined DNA/RNA Molecule: Synthetic oligonucleotide
  Description of Artificial Sequence: Synthetic oligonucleotide
ucaggcacuccucaauugctt

SEQ ID NO: 10726 - DNA, 21 bp, Artificial Sequence
  Description of Combined DNA/RNA Molecule: Synthetic oligonucleotide
  Description of Artificial Sequence: Synthetic oligonucleotide
ugaucccuggguuuugcuutt

SEQ ID NO: 10727 - DNA, 21 bp, Artificial Sequence
  Description of Combined DNA/RNA Molecule: Synthetic oligonucleotide
  Description of Artificial Sequence: Synthetic oligonucleotide
aagcaaaacccagggaucatt

SEQ ID NO: 10728 - DNA, 21 bp, Artificial Sequence
  Description of Combined DNA/RNA Molecule: Synthetic oligonucleotide
  Description of Artificial Sequence: Synthetic oligonucleotide
ugcuucuugguucaacucctt

SEQ ID NO: 10729 - DNA, 21 bp, Artificial Sequence
  Description of Combined DNA/RNA Molecule: Synthetic oligonucleotide
  Description of Artificial Sequence: Synthetic oligonucleotide
ggaguugaaccaagaagcatt

SEQ ID NO: 10730 - DNA, 21 bp, Artificial Sequence
  Description of Combined DNA/RNA Molecule: Synthetic oligonucleotide
  Description of Artificial Sequence: Synthetic oligonucleotide
uagagagaauggugcucuctt

SEQ ID NO: 10731 - DNA, 21 bp, Artificial Sequence
  Description of Combined DNA/RNA Molecule: Synthetic oligonucleotide
  Description of Artificial Sequence: Synthetic oligonucleotide
gagagcaccauucucucuatt

SEQ ID NO: 10732 - DNA, 21 bp, Artificial Sequence
  Description of Combined DNA/RNA Molecule: Synthetic oligonucleotide
  Description of Artificial Sequence: Synthetic oligonucleotide
uaaggcgaaucuggcgccatt

SEQ ID NO: 10733 - DNA, 21 bp, Artificial Sequence
  Description of Combined DNA/RNA Molecule: Synthetic oligonucleotide
  Description of Artificial Sequence: Synthetic oligonucleotide
uggcgccagauucgccuuatt

SEQ ID NO: 10734 - DNA, 21 bp, Artificial Sequence
  Description of Combined DNA/RNA Molecule: Synthetic oligonucleotide
  Description of Artificial Sequence: Synthetic oligonucleotide
ggaucuuauuucuucggagtt

SEQ ID NO: 10735 - DNA, 21 bp, Artificial Sequence
  Description of Combined DNA/RNA Molecule: Synthetic oligonucleotide
  Description of Artificial Sequence: Synthetic oligonucleotide
cuccgaagaaauaagaucctt

SEQ ID NO: 10736 - DNA, 22 bp, Artificial Sequence
  Description of Combined DNA/RNA Molecule: Synthetic oligonucleotide
  Description of Artificial Sequence: Synthetic oligonucleotide
ggaucuuauuucuucggagatt

SEQ ID NO: 10737 - DNA, 22 bp, Artificial Sequence
  Description of Combined DNA/RNA Molecule: Synthetic oligonucleotide
  Description of Artificial Sequence: Synthetic oligonucleotide
ucuccgaagaaauaagaucctt

SEQ ID NO: 10738 - DNA, 21 bp, Artificial Sequence
  Description of Combined DNA/RNA Molecule: Synthetic oligonucleotide
  Description of Artificial Sequence: Synthetic oligonucleotide
ccgaggucgaaacguacgutt

SEQ ID NO: 10739 - DNA, 21 bp, Artificial Sequence
  Description of Combined DNA/RNA Molecule: Synthetic oligonucleotide
  Description of Artificial Sequence: Synthetic oligonucleotide
acguacguuucgaccucggtt

SEQ ID NO: 10740 - DNA, 21 bp, Artificial Sequence
  Description of Combined DNA/RNA Molecule: Synthetic oligonucleotide
  Description of Artificial Sequence: Synthetic oligonucleotide
cagauugcugacucccagctt

SEQ ID NO: 10741 - DNA, 21 bp, Artificial Sequence
  Description of Combined DNA/RNA Molecule: Synthetic oligonucleotide
  Description of Artificial Sequence: Synthetic oligonucleotide
gcugggagucagcaaucugtt

SEQ ID NO: 10742 - DNA, 21 bp, Artificial Sequence
  Description of Combined DNA/RNA Molecule: Synthetic oligonucleotide
  Description of Artificial Sequence: Synthetic oligonucleotide
uggcuggaucgagugagcatt

SEQ ID NO: 10743 - DNA, 21 bp, Artificial Sequence
  Description of Combined DNA/RNA Molecule: Synthetic oligonucleotide
  Description of Artificial Sequence: Synthetic oligonucleotide
ugcucacucgauccagccatt

SEQ ID NO: 10744 - DNA, 21 bp, Artificial Sequence
  Description of Combined DNA/RNA Molecule: Synthetic oligonucleotide
  Description of Artificial Sequence: Synthetic oligonucleotide
gaauaucgaaaggaacagctt

SEQ ID NO: 10745 - DNA, 21 bp, Artificial Sequence
  Description of Combined DNA/RNA Molecule: Synthetic oligonucleotide
  Description of Artificial Sequence: Synthetic oligonucleotide
gcuguuccuuucgauauuctt

SEQ ID NO: 10746 - DNA, 21 bp, Artificial Sequence
  Description of Combined DNA/RNA Molecule: Synthetic oligonucleotide
  Description of Artificial Sequence: Synthetic oligonucleotide
cggcuucgccgagaucagaat

SEQ ID NO: 10747 - DNA, 21 bp, Artificial Sequence
  Description of Combined DNA/RNA Molecule: Synthetic oligonucleotide
  Description of Artificial Sequence: Synthetic oligonucleotide
ucugaucucggcgaagccgat

SEQ ID NO: 10748 - DNA, 21 bp, Artificial Sequence
  Description of Combined DNA/RNA Molecule: Synthetic oligonucleotide
  Description of Artificial Sequence: Synthetic oligonucleotide
guccuccgaugaggacucctt

SEQ ID NO: 10749 - DNA, 21 bp, Artificial Sequence
  Description of Combined DNA/RNA Molecule: Synthetic oligonucleotide
  Description of Artificial Sequence: Synthetic oligonucleotide
ggaguccucaucggaggactt

SEQ ID NO: 10750 - DNA, 21 bp, Artificial Sequence
  Description of Combined DNA/RNA Molecule: Synthetic oligonucleotide
  Description of Artificial Sequence: Synthetic oligonucleotide
ugauaacacaguucgaguctt

SEQ ID NO: 10751 - DNA, 21 bp, Artificial Sequence
  Description of Combined DNA/RNA Molecule: Synthetic oligonucleotide
  Description of Artificial Sequence: Synthetic oligonucleotide
gacucgaacuguguuaucatt

SEQ ID NO: 10752 - RNA, 21 nt, Artificial Sequence
  Description of Artificial Sequence: Synthetic oligonucleotide
ggcuacguccaggagcgcauu

SEQ ID NO: 10753 - RNA, 21 nt, Artificial Sequence
  Description of Artificial Sequence: Synthetic oligonucleotide
ugcgcuccuggacguagccuu

SEQ ID NO: 10754 - DNA, 18 bp, Artificial Sequence
  Description of Artificial Sequence: Synthetic primer
tttttttttttttttttt

SEQ ID NO: 10755 - DNA, 22 bp, Artificial Sequence
  Description of Artificial Sequence: Synthetic primer
ctcgtcgcttatgacaaagaag

SEQ ID NO: 10756 - DNA, 36 bp, Artificial Sequence
  Description of Artificial Sequence: Synthetic primer
atatcgtctcgtattagtagaaacaagggtattttt

SEQ ID NO: 10757 - DNA, 21 bp, Artificial Sequence
  Description of Artificial Sequence: Synthetic primer
caggacatactgatgaggatg

SEQ ID NO: 10758 - DNA, 35 bp, Artificial Sequence
  Description of Artificial Sequence: Synthetic primer
atatcgtctcgtattagtagaaacaagggtgtttt

SEQ ID NO: 10759 - DNA, 21 bp, Artificial Sequence
  Description of Artificial Sequence: Synthetic primer
agatcatcatgtgagtcagac

SEQ ID NO: 10760 - DNA, 21 bp, Artificial Sequence
  Description of Artificial Sequence: Synthetic primer
gtttcagagactcgaactgtg

SEQ ID NO: 10761 - DNA, 24 bp, Artificial Sequence
  Description of Artificial Sequence: Synthetic primer
cgctcagacatgagaacagaatgg

SEQ ID NO: 10762 - DNA, 36 bp, Artificial Sequence
  Description of Artificial Sequence: Synthetic primer
atatcgtctcgtattagtagaaacaaggtagttttt

SEQ ID NO: 10763 - DNA, 23 bp, Artificial Sequence
  Description of Artificial Sequence: Synthetic primer
taactagcctgactagcaacctc

SEQ ID NO: 10764 - DNA, 25 bp, Artificial Sequence
  Description of Artificial Sequence: Synthetic primer
gtgcagaaatcagcccgaatggttc

SEQ ID NO: 10765 - DNA, 33 bp, Artificial Sequence
  Description of Artificial Sequence: Synthetic primer
atatcgtctcgtattagtagaaacaaggcattt

SEQ ID NO: 10766 - DNA, 24 bp, Artificial Sequence
  Description of Artificial Sequence: Synthetic primer
gcgaaaggagagaaggctaatgtg

SEQ ID NO: 10767 - DNA, 34 bp, Artificial Sequence
  Description of Artificial Sequence: Synthetic primer
atatggtctcgtattagtagaaacaaggtcgttt

SEQ ID NO: 10768 - DNA, 25 bp, Artificial Sequence
  Description of Artificial Sequence: Synthetic primer
gcttcttatcgttcaggctcttagg

SEQ ID NO: 10769 - DNA, 33 bp, Artificial Sequence
  Description of Artificial Sequence: Synthetic primer
atatcgtctcgtattagtagaaacaaggtactt

SEQ ID NO: 10770 - DNA, 24 bp, Artificial Sequence
  Description of Artificial Sequence: Synthetic primer
cggattgatgcacggattgatttc

SEQ ID NO: 10771 - DNA, 27 bp, Artificial Sequence
  Description of Artificial Sequence: Synthetic primer
gacgtctgagctcttcaatggtggaac

SEQ ID NO: 10772 - DNA, 24 bp, Artificial Sequence
  Description of Artificial Sequence: Synthetic primer
aatcgctgtctggctgtcagtaag

SEQ ID NO: 10773 - DNA, 25 bp, Artificial Sequence
  Description of Artificial Sequence: Synthetic primer
ccgagaagcattaagcaaaacccag

SEQ ID NO: 10774 - DNA, 20 bp, Artificial Sequence
  Description of Artificial Sequence: Synthetic primer
tctgtcagggttggaaagtc

SEQ ID NO: 10775 - DNA, 20 bp, Artificial Sequence
  Description of Artificial Sequence: Synthetic primer
aaatgcaaaccgcttccaac

SEQ ID NO: 10776 - DNA, 57 bp, Artificial Sequence
  Description of Artificial Sequence: Synthetic oligonucleotide
tggatcttatttcttcggagattcaagagatctccgaagaaataagatccttttttc

SEQ ID NO: 10777 - DNA, 61 bp, Artificial Sequence
  Description of Artificial Sequence: Synthetic oligonucleotide
tcgagaaaaaaggatcttatttcttcggagatctcttgaatctccgaagaaataagatcca

SEQ ID NO: 10778 - DNA, 55 bp, Artificial Sequence
  Description of Artificial Sequence: Synthetic oligonucleotide
tgatctgttccaccattgaattcaagagattcaatggtggaacagatcttttttc

SEQ ID NO: 10779 - DNA, 59 bp, Artificial Sequence
  Description of Artificial Sequence: Synthetic oligonucleotide
tcgagaaaaaagatctgttccaccattgaatctcttgaattcaatggtggaacagatca

SEQ ID NO: 10780 - DNA, 56 bp, Artificial Sequence
  Description of Artificial Sequence: Synthetic oligonucleotide
tgcgataatataactgcaagattcaagagatcttgcagttatattatcgttttttc

SEQ ID NO: 10781 - DNA, 60 bp, Artificial Sequence
  Description of Artificial Sequence: Synthetic oligonucleotide
tcgagaaaaaacgataatataactgcaagatctcttgaatcttgcagttatattatcgca

SEQ ID NO: 10782 - DNA, 19 bp, Artificial Sequence
  Description of Artificial Sequence: Synthetic oligonucleotide
cgataatataactgcaaga

SEQ ID NO: 10783 - DNA, 19 bp, Artificial Sequence
  Description of Artificial Sequence: Synthetic oligonucleotide
tcttgcagttatattatcg

SEQ ID NO: 10784 - DNA, 55 bp, Artificial Sequence
  Description of Artificial Sequence: Synthetic oligonucleotide
tgcaattgaggagtgcctgattcaagagatcaggcactcctcaattgcttttttc

SEQ ID NO: 10785 - DNA, 59 bp, Artificial Sequence
  Description of Artificial Sequence: Synthetic oligonucleotide
tcgagaaaaaagcaattgaggagtgcctgatctcttgaatcaggcactcctcaattgca

SEQ ID NO: 10786 - RNA, 19 nt, Influenza A virus
agcaaaagcaggguagaua

SEQ ID NO: 10787 - RNA, 19 nt, Influenza A virus
gcaaaagcaggguagauaa

SEQ ID NO: 10788 - RNA, 19 nt, Influenza A virus
caaaagcaggguagauaau

SEQ ID NO: 10789 - RNA, 19 nt, Influenza A virus
aaaagcaggguagauaauc

SEQ ID NO: 10790 - RNA, 19 nt, Influenza A virus
aaagcaggguagauaauca

SEQ ID NO: 10791 - RNA, 19 nt, Influenza A virus
aagcaggguagauaaucac

SEQ ID NO: 10792 - DNA, 21 bp, Artificial Sequence
  Description of Combined DNA/RNA Molecule: Synthetic oligonucleotide
  Description of Artificial Sequence: Synthetic oligonucleotide
  modified_base (2): 2'-O-methyl guanine
  modified_base (4): 2'-O-methyl uracil
  modified_base (6): 2'-O-methyl uracil
  modified_base (8): 2'-O-methyl adenine
  modified_base (10): 2'-O-methyl uracil
  modified_base (12): 2'-O-methyl cytosine
  modified_base (14): 2'-O-methyl uracil
  modified_base (16): 2'-O-methyl guanine
  modified_base (18): 2'-O-methyl adenine
ggaucuuauuucuucggagtt

SEQ ID NO: 10793 - DNA, 21 bp, Artificial Sequence
  Description of Combined DNA/RNA Molecule: Synthetic oligonucleotide
  Description of Artificial Sequence: Synthetic oligonucleotide
  modified_base (1): 2'-O-methyl cytosine
  modified_base (3): 2'-O-methyl cytosine
  modified_base (5): 2'-O-methyl guanine
  modified_base (7): 2'-O-methyl adenine
  modified_base (9): 2'-O-methyl adenine
  modified_base (11): 2'-O-methyl adenine
  modified_base (13): 2'-O-methyl adenine
  modified_base (15): 2'-O-methyl guanine
  modified_base (17): 2'-O-methyl uracil
  modified_base (19): 2'-O-methyl cytosine
cuccgaagaaauaagaucctt

SEQ ID NO: 10794 - RNA, 19 nt, Influenza A virus
gccacugaaaucagagcau

SEQ ID NO: 10795 - RNA, 19 nt, Influenza A virus
ucagagcauccgucggaaa

SEQ ID NO: 10796 - RNA, 19 nt, Influenza A virus
ggacgauucuacauccaaa

SEQ ID NO: 10797 - RNA, 19 nt, Influenza A virus
cagcuuaacaauagagaga

SEQ ID NO: 10798 - RNA, 19 nt, Influenza A virus
gcuuaacaauagagagaau

SEQ ID NO: 10799 - RNA, 19 nt, Influenza A virus
aauagagagaauggugcuc

SEQ ID NO: 10800 - RNA, 19 nt, Influenza A virus
gggaaagauccuaagaaaa

SEQ ID NO: 10801 - RNA, 19 nt, Influenza A virus
ggaaagauccuaagaaaac

SEQ ID NO: 10802 - RNA, 19 nt, Influenza A virus
ugagagaacucauccuuua

SEQ ID NO: 10803 - RNA, 19 nt, Influenza A virus
uuaugacaaagaagaaaua

SEQ ID NO: 10804 - RNA, 19 nt, Influenza A virus
acaagaauugcuuaugaaa

SEQ ID NO: 10805 - RNA, 19 nt, Influenza A virus
gaauugcuuaugaaagaau

SEQ ID NO: 10806 - RNA, 19 nt, Influenza A virus
aagcaaugauggaucaagu

SEQ ID NO: 10807 - RNA, 19 nt, Influenza A virus
gcaaugauggaucaaguga

SEQ ID NO: 10808 - RNA, 19 nt, Influenza A virus
ugauggaucaagugagaga

SEQ ID NO: 10809 - RNA, 19 nt, Influenza A virus
ccacuagaggaguucaaau

SEQ ID NO: 10810 - RNA, 19 nt, Influenza A virus
cacuagaggaguucaaauu

SEQ ID NO: 10811 - RNA, 19 nt, Influenza A virus
gaggaaacaccaaucaaca

SEQ ID NO: 10812 - RNA, 19 nt, Influenza A virus
ggaaacaccaaucaacaga

SEQ ID NO: 10813 - RNA, 19 nt, Influenza A virus
gggccaaaucagcauacaa

SEQ ID NO: 10814 - RNA, 19 nt, Influenza A virus
caaccauuauggcagcauu

SEQ ID NO: 10815 - RNA, 19 nt, Influenza A virus
ccauuauggcagcauucaa

SEQ ID NO: 10816 - RNA, 19 nt, Influenza A virus
aggaugauggaaagugcaa

SEQ ID NO: 10817 - RNA, 19 nt, Influenza A virus
gaugauggaaagugcaaga

SEQ ID NO: 10818 - RNA, 19 nt, Influenza A virus
gaguaaugaaggaucuuau

SEQ ID NO: 10819 - RNA, 19 nt, Influenza A virus
ggaucuuauuucuucggag

SEQ ID NO: 10820 - RNA, 19 nt, Influenza A virus
gaucuuauuucuucggaga

SEQ ID NO: 10821 - RNA, 19 nt, Influenza A virus
ucuuauuucuucggagaca

SEQ ID NO: 10822 - RNA, 19 nt, Influenza A virus
ggaguacgacaauuaaaga

SEQ ID NO: 10823 - RNA, 19 nt, Human Parainfluenza virus 2
ccgguaacgauuccaguuu

SEQ ID NO: 10824 - RNA, 19 nt, Human Parainfluenza virus 2
gguaacgauuccaguuuua

SEQ ID NO: 10825 - RNA, 19 nt, Human Parainfluenza virus 2
ggguauuugucaucaauaa

SEQ ID NO: 10826 - RNA, 19 nt, Human Parainfluenza virus 2
gguauuugucaucaauaau

SEQ ID NO: 10827 - RNA, 19 nt, Human Parainfluenza virus 2
cguaagaucuagacuuuua

SEQ ID NO: 10828 - RNA, 19 nt, Human Parainfluenza virus 2
ccucagucuuuuaucacua

SEQ ID NO: 10829 - RNA, 19 nt, Human Parainfluenza virus 2
gaguaaucacaucaaauua

SEQ ID NO: 10830 - RNA, 19 nt, Human Parainfluenza virus 2
ccagaagccagcauagaua

SEQ ID NO: 10831 - RNA, 19 nt, Human Parainfluenza virus 2
gcauagauagaguagagau

SEQ ID NO: 10832 - RNA, 19 nt, Human Parainfluenza virus 2
cauagauagaguagagaua

SEQ ID NO: 10833 - RNA, 19 nt, Human Parainfluenza virus 2
gauaacaggguuugagaau

SEQ ID NO: 10834 - RNA, 19 nt, Human Parainfluenza virus 2
gguuugagaauaauucauu

SEQ ID NO: 10835 - RNA, 19 nt, Human Parainfluenza virus 2
ccagaugcucgaucaacua

SEQ ID NO: 10836 - RNA, 19 nt, Human Parainfluenza virus 2
gaggagaggugcuggcuuu

SEQ ID NO: 10837 - RNA, 19 nt, Human Parainfluenza virus 2
gcugaggacauuccugaua

SEQ ID NO: 10838 - RNA, 19 nt, Human Parainfluenza virus 2
ggacauuccugauacccuu

SEQ ID NO: 10839 - RNA, 19 nt, Human Parainfluenza virus 2
ccaaacuccauuuguaaau

SEQ ID NO: 10840 - RNA, 19 nt, Human Parainfluenza virus 2
gcuuaugcaggcauggaua

SEQ ID NO: 10841 - RNA, 19 nt, Human Parainfluenza virus 2
ggcuaaauaucaacaacaa

SEQ ID NO: 10842 - RNA, 19 nt, Human Parainfluenza virus 2
ggagaaucaaugcuaggua

SEQ ID NO: 10843 - RNA, 19 nt, Human Parainfluenza virus 2
gagaaucaaugcuagguau

SEQ ID NO: 10844 - RNA, 19 nt, Human Parainfluenza virus 2
ccugaagcacaaagacuaa

SEQ ID NO: 10845 - RNA, 19 nt, Human Parainfluenza virus 2
gcacaaagacuaauucaga

SEQ ID NO: 10846 - RNA, 19 nt, Human Parainfluenza virus 2
ccgcaagucaaugguagua

SEQ ID NO: 10847 - RNA, 19 nt, Human Parainfluenza virus 2
gcaaaccgcuacuaugcua

SEQ ID NO: 10848 - RNA, 19 nt, Human Parainfluenza virus 2
cagcggaaugggaggauuu

SEQ ID NO: 10849 - RNA, 19 nt, Human Parainfluenza virus 2
ggauuuuucuuaacacuua

SEQ ID NO: 10850 - RNA, 19 nt, Human Parainfluenza virus 2
ggaacaagauggccuacau

SEQ ID NO: 10851 - RNA, 19 nt, Human Parainfluenza virus 2
ggggaacuccagaaauuaa

SEQ ID NO: 10852 - RNA, 19 nt, Human Parainfluenza virus 2
gggaacuccagaaauuaaa

SEQ ID NO: 10853 - RNA, 19 nt, Human Parainfluenza virus 2
ccaaguacauggcucuauu

SEQ ID NO: 10854 - RNA, 19 nt, Human Parainfluenza virus 2
guacauggcucuauuagaa

SEQ ID NO: 10855 - RNA, 19 nt, Human Parainfluenza virus 2
caccaaaacugauggauuu

SEQ ID NO: 10856 - RNA, 19 nt, Human Parainfluenza virus 2
cugaauauccauuagauua

SEQ ID NO: 10857 - RNA, 19 nt, Human Parainfluenza virus 2
ggguauuggaacuguccuu

SEQ ID NO: 10858 - RNA, 19 nt, Human Parainfluenza virus 2
gaacuguccuugauacaaa

SEQ ID NO: 10859 - RNA, 19 nt, Human Parainfluenza virus 2
gauacaaauaugagaaauu

SEQ ID NO: 10860 - RNA, 19 nt, Human Parainfluenza virus 2
gcauacgguagaucauauu

SEQ ID NO: 10861 - RNA, 19 nt, Human Parainfluenza virus 2
cgguagaucauauuuaaau

SEQ ID NO: 10862 - RNA, 19 nt, Human Parainfluenza virus 2
cauauuuaaaucagcaaua

SEQ ID NO: 10863 - RNA, 19 nt, Human Parainfluenza virus 2
gaguagaaacagcaaggaa

SEQ ID NO: 10864 - RNA, 19 nt, Human Parainfluenza virus 2
gcaugacugcugcagacaa

SEQ ID NO: 10865 - RNA, 19 nt, Human Parainfluenza virus 2
caugacugcugcagacaaa

SEQ ID NO: 10866 - RNA, 19 nt, Human Parainfluenza virus 2
gcaaccauaucaaagcuau

SEQ ID NO: 10867 - RNA, 19 nt, Human Parainfluenza virus 2
cccauuugcuggagcaaau

SEQ ID NO: 10868 - RNA, 19 nt, Human Parainfluenza virus 2
ggagcaaaugacagagaaa

SEQ ID NO: 10869 - RNA, 19 nt, Human Parainfluenza virus 2
cagagaaaugggaggacaa

SEQ ID NO: 10870 - RNA, 19 nt, Human Parainfluenza virus 2
gggaggacaagcaaaugau

SEQ ID NO: 10871 - RNA, 19 nt, Human Parainfluenza virus 2
ggaggacaagcaaaugaua

SEQ ID NO: 10872 - RNA, 19 nt, Human Parainfluenza virus 2
guguauaacuucaauccaa

SEQ ID NO: 10873 - RNA, 19 nt, Human Parainfluenza virus 2
ggacagaauugacaacgau

SEQ ID NO: 10874 - RNA, 19 nt, Human Parainfluenza virus 2
cagaauugacaacgaucaa

SEQ ID NO: 10875 - RNA, 19 nt, Human Parainfluenza virus 2
gugacaaccagcagagauu

SEQ ID NO: 10876 - RNA, 19 nt, Human Parainfluenza virus 2
ccgcaaagaacaucaggua

SEQ ID NO: 10877 - RNA, 19 nt, Human Parainfluenza virus 2
cgcaaagaacaucagguau

SEQ ID NO: 10878 - RNA, 19 nt, Human Parainfluenza virus 2
gugcuaugcaugagcaaua

SEQ ID NO: 10879 - RNA, 19 nt, Human Parainfluenza virus 2
ccaggaugaugaugccaau

SEQ ID NO: 10880 - RNA, 19 nt, Human Parainfluenza virus 2
ggaugaugaugccaaugau

SEQ ID NO: 10881 - RNA, 19 nt, Human Parainfluenza virus 2
ccacagaugggaaugacau

SEQ ID NO: 10882 - RNA, 19 nt, Human Parainfluenza virus 2
ccuaacucucaaugucaua

SEQ ID NO: 10883 - RNA, 19 nt, Human Parainfluenza virus 2
cggaaacaauucucucaua

SEQ ID NO: 10884 - RNA, 19 nt, Human Parainfluenza virus 2
ggaaacaauucucucauaa

SEQ ID NO: 10885 - RNA, 19 nt, Human Metapneumovirus
cuucaagggauucaccuaa

SEQ ID NO: 10886 - RNA, 19 nt, Human Metapneumovirus
ccuaagugaucugucauau

SEQ ID NO: 10887 - RNA, 19 nt, Human Metapneumovirus
cuaagugaucugucauaua

SEQ ID NO: 10888 - RNA, 19 nt, Human Metapneumovirus
gucauauaaacaugcuaua

SEQ ID NO: 10889 - RNA, 19 nt, Human Metapneumovirus
cauauaaacaugcuauauu

SEQ ID NO: 10890 - RNA, 19 nt, Human Metapneumovirus
gagucucaauacacaauaa

SEQ ID NO: 10891 - RNA, 19 nt, Human Metapneumovirus
cacaauaaaaagagaugua

SEQ ID NO: 10892 - RNA, 19 nt, Human Metapneumovirus
caucauugcagcaagagau

SEQ ID NO: 10893 - RNA, 19 nt, Human Metapneumovirus
gcagcaagagauaacacuu

SEQ ID NO: 10894 - RNA, 19 nt, Human Metapneumovirus
cagcaagagauaacacuuu

SEQ ID NO: 10895 - RNA, 19 nt, Human Metapneumovirus
ggagagauucuuuacacua

SEQ ID NO: 10896 - RNA, 19 nt, Human Metapneumovirus
gagagauucuuuacacuaa

SEQ ID NO: 10897 - RNA, 19 nt, Human Metapneumovirus
cuaaacauacugauuacaa

SEQ ID NO: 10898 - RNA, 19 nt, Human Metapneumovirus
caaauaugcugcagagaua

SEQ ID NO: 10899 - RNA, 19 nt, Human Metapneumovirus
gcagagauagggauacaau

SEQ ID NO: 10900 - RNA, 19 nt, Human Metapneumovirus
cagagauagggauacaaua

SEQ ID NO: 10901 - RNA, 19 nt, Human Metapneumovirus
gagauagggauacaauaua

SEQ ID NO: 10902 - RNA, 19 nt, Human Metapneumovirus
gauagggauacaauauauu

SEQ ID NO: 10903 - RNA, 19 nt, Human Metapneumovirus
gggauacaauauauuugca

SEQ ID NO: 10904 - RNA, 19 nt, Human Metapneumovirus
ggcucuaggaucagaaaga

SEQ ID NO: 10905 - RNA, 19 nt, Human Metapneumovirus
cagaaagaguacaacagau

SEQ ID NO: 10906 - RNA, 19 nt, Human Metapneumovirus
gaaagaguacaacagauuu

SEQ ID NO: 10907 - RNA, 19 nt, Human Metapneumovirus
guacaacagauuuuaagaa

SEQ ID NO: 10908 - RNA, 19 nt, Human Metapneumovirus
caacagauuuuaagaaauu

SEQ ID NO: 10909 - RNA, 19 nt, Human Metapneumovirus
gcagugaaguucagguggu

SEQ ID NO: 10910 - RNA, 19 nt, Human Metapneumovirus
cagugaaguucaggugguu

SEQ ID NO: 10911 - RNA, 19 nt, Human Metapneumovirus
gacauacucuuuagggaaa

SEQ ID NO: 10912 - RNA, 19 nt, Human Metapneumovirus
cucuuuagggaaagguaaa

SEQ ID NO: 10913 - RNA, 19 nt, Human Metapneumovirus
gggaaagguaaaaauagua

SEQ ID NO: 10914 - RNA, 19 nt, Human Metapneumovirus
ggaaagguaaaaauaguaa

SEQ ID NO: 10915 - RNA, 19 nt, Human Metapneumovirus
gaaagguaaaaauaguaaa

SEQ ID NO: 10916 - RNA, 19 nt, Human Metapneumovirus
ggggaagaguugcaaaugu

SEQ ID NO: 10917 - RNA, 19 nt, Human Metapneumovirus
gggaagaguugcaaauguu

SEQ ID NO: 10918 - RNA, 19 nt, Human Metapneumovirus
ggaagaguugcaaauguua

SEQ ID NO: 10919 - RNA, 19 nt, Human Metapneumovirus
gaguugcaaauguuagaua

SEQ ID NO: 10920 - RNA, 19 nt, Human Metapneumovirus
guugcaaauguuagauaua

SEQ ID NO: 10921 - RNA, 19 nt, Human Metapneumovirus
gcaaauguuagauauacau

SEQ ID NO: 10922 - RNA, 19 nt, Human Metapneumovirus
gauauacauggaguggaaa

SEQ ID NO: 10923 - RNA, 19 nt, Human Metapneumovirus
ggaaaagaguuggguagaa

SEQ ID NO: 10924 - RNA, 19 nt, Human Metapneumovirus
gaguuggguagaagaaaua

SEQ ID NO: 10925 - RNA, 19 nt, Human Metapneumovirus
ggguagaagaaauagacaa

SEQ ID NO: 10926 - RNA, 19 nt, Human Metapneumovirus
gguagaagaaauagacaaa

SEQ ID NO: 10927 - RNA, 19 nt, Human Metapneumovirus
gaaauagacaaagaggcaa

SEQ ID NO: 10928 - RNA, 19 nt, Human Metapneumovirus
gacaaagaggcaagaaaaa

SEQ ID NO: 10929 - RNA, 19 nt, Human Metapneumovirus
gcaagaaaaacaaugguga

SEQ ID NO: 10930 - RNA, 19 nt, Human Metapneumovirus
gaaaaacaauggugacuuu

SEQ ID NO: 10931 - RNA, 19 nt, Human Metapneumovirus
caauggugacuuugcuaaa

SEQ ID NO: 10932 - RNA, 19 nt, Human Metapneumovirus
gugacuuugcuaaaggaau

SEQ ID NO: 10933 - RNA, 19 nt, Human Metapneumovirus
gcuaaaggaaucaucaggu

SEQ ID NO: 10934 - RNA, 19 nt, Human Metapneumovirus
cuaaaggaaucaucaggua

SEQ ID NO: 10935 - RNA, 19 nt, Human Metapneumovirus
cagguaacaucccacaaaa

SEQ ID NO: 10936 - RNA, 19 nt, Human Metapneumovirus
ccacaaaaccagaggccuu

SEQ ID NO: 10937 - RNA, 19 nt, Human Metapneumovirus
ccagaggccuucagcacca

SEQ ID NO: 10938 - RNA, 19 nt, Human Metapneumovirus
gccuucagcaccagacaca

SEQ ID NO: 10939 - RNA, 19 nt, Human Metapneumovirus
gcaccagacacaccaauaa

SEQ ID NO: 10940 - RNA, 19 nt, Human Metapneumovirus
caccagacacaccaauaau

SEQ ID NO: 10941 - RNA, 19 nt, Human Metapneumovirus
ccagacacaccaauaauuu

SEQ ID NO: 10942 - RNA, 19 nt, Human Metapneumovirus
guguaggugcuuuaauauu

SEQ ID NO: 10943 - RNA, 19 nt, Human Metapneumovirus
gugcuuuaauauucacuaa

SEQ ID NO: 10944 - RNA, 19 nt, Human Metapneumovirus
cuaaacuagcaucaacaau

SEQ ID NO: 10945 - RNA, 19 nt, Human Metapneumovirus
ggacuagagacuacaguua

SEQ ID NO: 10946 - RNA, 19 nt, Human Metapneumovirus
gcuaagugaugcgcucaaa

SEQ ID NO: 10947 - RNA, 19 nt, Human Metapneumovirus
gugaugcgcucaaaagaua

SEQ ID NO: 10948 - RNA, 19 nt, Human Metapneumovirus
caaaagauacccuagggua

SEQ ID NO: 10949 - RNA, 19 nt, Human Metapneumovirus
ggguagauauaccgaagau

SEQ ID NO: 10950 - RNA, 19 nt, Human Metapneumovirus
gauauaccgaagauugcua

SEQ ID NO: 10951 - RNA, 19 nt, Human Metapneumovirus
ccgaagauugcuagaucuu

SEQ ID NO: 10952 - RNA, 19 nt, Human Metapneumovirus
gaucuuucuaugaacuauu

SEQ ID NO: 10953 - RNA, 19 nt, Human Metapneumovirus
guguauuacaggagucuau

SEQ ID NO: 10954 - RNA, 19 nt, Human Metapneumovirus
ggagucuauucauugagua

SEQ ID NO: 10955 - RNA, 19 nt, Human Metapneumovirus
gagucuauucauugaguau

SEQ ID NO: 10956 - RNA, 19 nt, Human Metapneumovirus
gggaaagcuuuaggcucau

SEQ ID NO: 10957 - RNA, 19 nt, Human Metapneumovirus
gcuuuaggcucaucuucaa

SEQ ID NO: 10958 - RNA, 19 nt, Human Metapneumovirus
ggcucaucuucaacaggaa

SEQ ID NO: 10959 - RNA, 19 nt, Human Metapneumovirus
gaagcaaagcagaaaguuu

SEQ ID NO: 10960 - RNA, 19 nt, Human Metapneumovirus
caaagcagaaaguuuguuu

SEQ ID NO: 10961 - RNA, 19 nt, Human Metapneumovirus
gcagaaaguuuguuuguaa

SEQ ID NO: 10962 - RNA, 19 nt, Human Metapneumovirus
cagaaaguuuguuuguaaa

SEQ ID NO: 10963 - RNA, 19 nt, Human Metapneumovirus
gaaaguuuguuuguaaaua

SEQ ID NO: 10964 - RNA, 19 nt, Human Metapneumovirus
guuuguuuguaaauauauu

SEQ ID NO: 10965 - RNA, 19 nt, Human Metapneumovirus
gcuuauggagccggucaaa

SEQ ID NO: 10966 - RNA, 19 nt, Human Metapneumovirus
ggucaaacaaugcuaaggu

SEQ ID NO: 10967 - RNA, 19 nt, Human Metapneumovirus
gggugucauugccagauca

SEQ ID NO: 10968 - RNA, 19 nt, Human Metapneumovirus
gccagaucaucuaacaaca

SEQ ID NO: 10969 - RNA, 19 nt, Human Metapneumovirus
ccagaucaucuaacaacau

SEQ ID NO: 10970 - RNA, 19 nt, Human Metapneumovirus
cagaucaucuaacaacaua

SEQ ID NO: 10971 - RNA, 19 nt, Human Metapneumovirus
gaucaucuaacaacauaau

SEQ ID NO: 10972 - RNA, 19 nt, Human Metapneumovirus
caacauaaugcuaggacau

SEQ ID NO: 10973 - RNA, 19 nt, Human Metapneumovirus
cugugcaagcugaauugaa

SEQ ID NO: 10974 - RNA, 19 nt, Human Metapneumovirus
gcugaauugaagcaaguua

SEQ ID NO: 10975 - RNA, 19 nt, Human Metapneumovirus
gaagcaaguuacagagguu

SEQ ID NO: 10976 - RNA, 19 nt, Human Metapneumovirus
guuacagagguuuaugauu

SEQ ID NO: 10977 - RNA, 19 nt, Human Metapneumovirus
gguuuaugauuuggugaga

SEQ ID NO: 10978 - RNA, 19 nt, Human Metapneumovirus
gguccugaaucugggcuuu

SEQ ID NO: 10979 - RNA, 19 nt, Human Metapneumovirus
gcuuuuacaucuaagacaa

SEQ ID NO: 10980 - RNA, 19 nt, Human Metapneumovirus
gcuucaggucuagguauaa

SEQ ID NO: 10981 - RNA, 19 nt, Human Metapneumovirus
ggucuagguauaaucggaa

SEQ ID NO: 10982 - RNA, 19 nt, Human Metapneumovirus
gcuauuuucugcagcagaa

SEQ ID NO: 10983 - RNA, 19 nt, Human Metapneumovirus
gcagaaaguuaugccagaa

SEQ ID NO: 10984 - RNA, 19 nt, Human Metapneumovirus
gccagaagcuuaaaagaaa

SEQ ID NO: 10985 - RNA, 19 nt, Human Metapneumovirus
gcuuaaaagaaagcaacaa

SEQ ID NO: 10986 - RNA, 19 nt, Human Metapneumovirus
gcucacagacgaagaaaaa

SEQ ID NO: 10987 - RNA, 19 nt, Human Respiratory syncytial virus
ccaauuaugaugugcaaaa

SEQ ID NO: 10988 - RNA, 19 nt, Human Respiratory syncytial virus
gcaaaaacaccuaaacaaa

SEQ ID NO: 10989 - RNA, 19 nt, Human Respiratory syncytial virus
gcuauuaaucacugaagau

SEQ ID NO: 10990 - RNA, 19 nt, Human Respiratory syncytial virus
ucauaaauucacaggauua

SEQ ID NO: 10991 - RNA, 19 nt, Human Respiratory syncytial virus
ggauuaauagguauguuau

SEQ ID NO: 10992 - RNA, 19 nt, Human Respiratory syncytial virus
gcuauguccagguuaggaa

SEQ ID NO: 10993 - RNA, 19 nt, Human Respiratory syncytial virus
ggaagggaagacacuauaa

SEQ ID NO: 10994 - RNA, 19 nt, Human Respiratory syncytial virus
gggaagacacuauaaagau

SEQ ID NO: 10995 - RNA, 19 nt, Human Respiratory syncytial virus
ggaagacacuauaaagaua

SEQ ID NO: 10996 - RNA, 19 nt, Human Respiratory syncytial virus
acuuaaagaugcuggauau

SEQ ID NO: 10997 - RNA, 19 nt, Human Respiratory syncytial virus
ggauaucauguuaaagcua

SEQ ID NO: 10998 - RNA, 19 nt, Human Respiratory syncytial virus
uguuaaagcuaauggagua

SEQ ID NO: 10999 - RNA, 19 nt, Human Respiratory syncytial virus
gcuaauggaguagauauaa

SEQ ID NO: 11000 - RNA, 19 nt, Human Respiratory syncytial virus
ggaguagauauaacaacau

SEQ ID NO: 11001 - RNA, 19 nt, Human Respiratory syncytial virus
cgucaagauauaaauggaa

SEQ ID NO: 11002 - RNA, 19 nt, Human Respiratory syncytial virus
agauauaaauggaaaggaa

SEQ ID NO: 11003 - RNA, 19 nt, Human Respiratory syncytial virus
gauauaaauggaaaggaaa

SEQ ID NO: 11004 - RNA, 19 nt, Human Respiratory syncytial virus
ggaaaugaaauucgaagua

SEQ ID NO: 11005 - RNA, 19 nt, Human Respiratory syncytial virus
ccuacaaaaaaaugcuaaa

SEQ ID NO: 11006 - RNA, 19 nt, Human Respiratory syncytial virus
gcuaaaagagaugggagaa

SEQ ID NO: 11007 - RNA, 19 nt, Human Respiratory syncytial virus
gggagaaguggcuccagaa

SEQ ID NO: 11008 - RNA, 19 nt, Human Respiratory syncytial virus
ggagaaguggcuccagaau

SEQ ID NO: 11009 - RNA, 19 nt, Human Respiratory syncytial virus
ccagaauauaggcaugauu

SEQ ID NO: 11010 - RNA, 19 nt, Human Respiratory syncytial virus
ccagacugugggaugauaa

SEQ ID NO: 11011 - RNA, 19 nt, Human Respiratory syncytial virus
ggaugauaauacuguguau

SEQ ID NO: 11012 - RNA, 19 nt, Human Respiratory syncytial virus
gcacuuguaauaaccaaau

SEQ ID NO: 11013 - RNA, 19 nt, Human Respiratory syncytial virus
ggagacagaucaggucuua

SEQ ID NO: 11014 - RNA, 19 nt, Human Respiratory syncytial virus
gcaguaauuaggagggcaa

SEQ ID NO: 11015 - RNA, 19 nt, Human Respiratory syncytial virus
gggcaaacaaugucuuaaa

SEQ ID NO: 11016 - RNA, 19 nt, Human Respiratory syncytial virus
gcaaacaaugucuuaaaaa

SEQ ID NO: 11017 - RNA, 19 nt, Human Respiratory syncytial virus
ggucucauaccaaaggaua

SEQ ID NO: 11018 - RNA, 19 nt, Human Respiratory syncytial virus
ggauauagcuaacaguuuu

SEQ ID NO: 11019 - RNA, 19 nt, Human Respiratory syncytial virus
gcacuuuggcauugcacaa

SEQ ID NO: 11020 - RNA, 19 nt, Human Respiratory syncytial virus
gguaguagaguugaaggaa

SEQ ID NO: 11021 - RNA, 19 nt, Human Respiratory syncytial virus
gggcaaguaaugcuaagau

SEQ ID NO: 11022 - RNA, 19 nt, Human Respiratory syncytial virus
gcuaagauggggaguuuua

SEQ ID NO: 11023 - RNA, 19 nt, Human Respiratory syncytial virus
gccaaaucuguaaaaaaua

SEQ ID NO: 11024 - RNA, 19 nt, Human Respiratory syncytial virus
ccaaaucuguaaaaaauau

SEQ ID NO: 11025 - RNA, 19 nt, Human Respiratory syncytial virus
gcuaguguccaggcagaaa

SEQ ID NO: 11026 - RNA, 19 nt, Human Respiratory syncytial virus
gcaaguuguggaagucuau

SEQ ID NO: 11027 - RNA, 19 nt, Human Respiratory syncytial virus
gcaucauugcugucauuaa

SEQ ID NO: 11028 - RNA, 19 nt, Human Respiratory syncytial virus
gcagcaggucuaggcauaa

SEQ ID NO: 11029 - RNA, 19 nt, Human Respiratory syncytial virus
aggcauaaugggagaguau

SEQ ID NO: 11030 - RNA, 19 nt, Human Respiratory syncytial virus
ccaagaaaccaggaucuuu

SEQ ID NO: 11031 - RNA, 19 nt, Human Respiratory syncytial virus
gcagagcaacucaaagaaa

SEQ ID NO: 11032 - RNA, 19 nt, Human Respiratory syncytial virus
caaagaaaauggaguaaua

SEQ ID NO: 11033 - RNA, 19 nt, Human Respiratory syncytial virus
guaauaaacuacaguguau

SEQ ID NO: 11034 - RNA, 19 nt, Human Respiratory syncytial virus
ccauaaagaaucaacucaa

SEQ ID NO: 11035 - RNA, 19 nt, Human Respiratory syncytial virus
cccuaaagaagaugaugua

SEQ ID NO: 11036 - RNA, 19 nt, Human Respiratory syncytial virus
gcuuuaaguuaacaaaaaa

SEQ ID NO: 11037 - RNA, 19 nt, Human Coronavirus
gguaagcaauccaguagua

SEQ ID NO: 11038 - RNA, 19 nt, Human Coronavirus
gcaaccaucaggagggaau

SEQ ID NO: 11039 - RNA, 19 nt, Human Coronavirus
ggaauuacucaguuucaaa

SEQ ID NO: 11040 - RNA, 19 nt, Human Coronavirus
gggaaaggaguuugaguuu

SEQ ID NO: 11041 - RNA, 19 nt, Human Coronavirus
cgguacucccucaggguua

SEQ ID NO: 11042 - RNA, 19 nt, Human Coronavirus
gcuccuaauuccagaucua

SEQ ID NO: 11043 - RNA, 19 nt, Human Coronavirus
ccaaagaagucagacagaa

SEQ ID NO: 11044 - RNA, 19 nt, Human Coronavirus
caaagaagucagacagaaa

SEQ ID NO: 11045 - RNA, 19 nt, West Nile Virus
cuauguugagccugaucga

SEQ ID NO: 11046 - RNA, 19 nt, West Nile Virus
ucuucagguucacagcaau

SEQ ID NO: 11047 - RNA, 19 nt, West Nile Virus
cagguucacagcaauugcu

SEQ ID NO: 11048 - RNA, 19 nt, West Nile Virus
agugcuggaucgauggaga

SEQ ID NO: 11049 - RNA, 19 nt, West Nile Virus
gaucgauggagagguguga

SEQ ID NO: 11050 - RNA, 19 nt, West Nile Virus
gauggagaggugugaacaa

SEQ ID NO: 11051 - RNA, 19 nt, West Nile Virus
ggagaggugugaacaaaca

SEQ ID NO: 11052 - RNA, 19 nt, West Nile Virus
caaacaaacagcgaugaaa

SEQ ID NO: 11053 - RNA, 19 nt, West Nile Virus
aaacaaacagcgaugaaac

SEQ ID NO: 11054 - RNA, 19 nt, West Nile Virus
aacaaacagcgaugaaaca

SEQ ID NO: 11055 - RNA, 19 nt, West Nile Virus
caaacagcgaugaaacacc

SEQ ID NO: 11056 - RNA, 19 nt, West Nile Virus
aaacagcgaugaaacaccu

SEQ ID NO: 11057 - RNA, 19 nt, West Nile Virus
cagcgaugaaacaccuucu

SEQ ID NO: 11058 - RNA, 19 nt, West Nile Virus
gcgaugaaacaccuucuga

SEQ ID NO: 11059 - RNA, 19 nt, West Nile Virus
cgaugaaacaccuucugag

SEQ ID NO: 11060 - RNA, 19 nt, West Nile Virus
gaugaaacaccuucugagu

SEQ ID NO: 11061 - RNA, 19 nt, West Nile Virus
caccuucugaguuuuaaga

SEQ ID NO: 11062 - RNA, 19 nt, West Nile Virus
uaagaaggaacuagggacc

SEQ ID NO: 11063 - RNA, 19 nt, West Nile Virus
aaggaacuagggaccuuga

SEQ ID NO: 11064 - RNA, 19 nt, West Nile Virus
gaacuagggaccuugacca

SEQ ID NO: 11065 - RNA, 19 nt, West Nile Virus
gggaccuugaccagugcua

SEQ ID NO: 11066 - RNA, 19 nt, West Nile Virus
ggaccuugaccagugcuau

SEQ ID NO: 11067 - RNA, 19 nt, West Nile Virus
cuugaccagugcuaucaau

SEQ ID NO: 11068 - RNA, 19 nt, West Nile Virus
cggcggagcucaaaacaaa

SEQ ID NO: 11069 - RNA, 19 nt, West Nile Virus
cggagcucaaaacaaaaga

SEQ ID NO: 11070 - RNA, 19 nt, West Nile Virus
ggagcucaaaacaaaagaa

SEQ ID NO: 11071 - RNA, 19 nt, West Nile Virus
gagcucaaaacaaaagaaa

SEQ ID NO: 11072 - RNA, 19 nt, Dengue virus type 2
gaugaaugaccaacggaaa

SEQ ID NO: 11073 - RNA, 19 nt, Dengue virus type 2
cggaaaaaggcgagaaaca

SEQ ID NO: 11074 - RNA, 19 nt, Dengue virus type 2
cgagaaacacgccuuucaa

SEQ ID NO: 11075 - RNA, 19 nt, Dengue virus type 2
cgagagaaaccgcguguca

SEQ ID NO: 11076 - RNA, 19 nt, Dengue virus type 2
ccgcgugucaacuguacaa

SEQ ID NO: 11077 - RNA, 19 nt, Dengue virus type 2
cuguacaacaguugacaaa

SEQ ID NO: 11078 - RNA, 19 nt, Dengue virus type 2
gcagggacgaggaccacua

SEQ ID NO: 11079 - RNA, 19 nt, Dengue virus type 2
gggacgaggaccacuaaaa

SEQ ID NO: 11080 - RNA, 19 nt, Dengue virus type 2
cccaccaacagcagggaua

SEQ ID NO: 11081 - RNA, 19 nt, Dengue virus type 2
ccaccaacagcagggauau

SEQ ID NO: 11082 - RNA, 19 nt, Dengue virus type 2
ccaacagcagggauauuaa

SEQ ID NO: 11083 - RNA, 19 nt, Dengue virus type 2
gggaacaauuaaaaaauca

SEQ ID NO: 11084 - RNA, 19 nt, Dengue virus type 2
ggaacaauuaaaaaaucaa

SEQ ID NO: 11085 - RNA, 19 nt, Dengue virus type 2
ggaaagagauuggaaggau

SEQ ID NO: 11086 - RNA, 19 nt, Dengue virus type 2
gcaugaucaucaugcugau

SEQ ID NO: 11087 - RNA, 19 nt, Rhinovirus 16
gcgcucaaguaucuagaca

SEQ ID NO: 11088 - RNA, 19 nt, Rhinovirus 16
gcucaaguaucuagacaga

SEQ ID NO: 11089 - RNA, 19 nt, Rhinovirus 16
gguacgcacucaacacaaa

SEQ ID NO: 11090 - RNA, 19 nt, Rhinovirus 16
cacaaaauauggugucaaa

SEQ ID NO: 11091 - RNA, 19 nt, Rhinovirus 16
ggauccagccucaauuauu

SEQ ID NO: 11092 - RNA, 19 nt, Rhinovirus 16
ccucaauuauuuuaacauu

SEQ ID NO: 11093 - RNA, 19 nt, Rhinovirus 16
ggagaaaggcauacccacu

SEQ ID NO: 11094 - RNA, 19 nt, Rhinovirus 16
gcaaucuccaaguguagaa

SEQ ID NO: 11095 - RNA, 19 nt, Rhinovirus 16
guguagaagcuuguggaua

SEQ ID NO: 11096 - RNA, 19 nt, Rhinovirus 16
gcuuguggauacucugaua

SEQ ID NO: 11097 - RNA, 19 nt, Rhinovirus 16
guggauacucugauagaau

SEQ ID NO: 11098 - RNA, 19 nt, Rhinovirus 16
ggauacucugauagaauaa

SEQ ID NO: 11099 - RNA, 19 nt, Rhinovirus 16
cugauagaauaauccaaau

SEQ ID NO: 11100 - RNA, 19 nt, Rhinovirus 16
gauagaauaauccaaauua

SEQ ID NO: 11101 - RNA, 19 nt, Rhinovirus 16
cauaacaucucaagauguu

SEQ ID NO: 11102 - RNA, 19 nt, Rhinovirus 16
caucucaagauguugcuaa

SEQ ID NO: 11103 - RNA, 19 nt, Rhinovirus 16
cuaaugcagugguugggua

SEQ ID NO: 11104 - RNA, 19 nt, Rhinovirus 16
ccgcaggaugcaacggcua

SEQ ID NO: 11105 - RNA, 19 nt, Rhinovirus 16
gcaggaugcaacggcuaua

SEQ ID NO: 11106 - RNA, 19 nt, Rhinovirus 16
ccagauacaucaucaaaua

SEQ ID NO: 11107 - RNA, 19 nt, Rhinovirus 16
ccagaugcucuuaaagaca

SEQ ID NO: 11108 - RNA, 19 nt, Rhinovirus 16
gcucuuaaagacaugggua

SEQ ID NO: 11109 - RNA, 19 nt, Rhinovirus 16
cucuuaaagacauggguau

SEQ ID NO: 11110 - RNA, 19 nt, Rhinovirus 16
cuuaaagacauggguauuu

SEQ ID NO: 11111 - RNA, 19 nt, Rhinovirus 16
ggguauuuuuggugaaaau

SEQ ID NO: 11112 - RNA, 19 nt, Rhinovirus 16
ggguagaagugguuauaca

SEQ ID NO: 11113 - RNA, 19 nt, Rhinovirus 16
cagugcacguacagugcaa

SEQ ID NO: 11114 - RNA, 19 nt, Rhinovirus 16
ccaccaggguacacuacua

SEQ ID NO: 11115 - RNA, 19 nt, Rhinovirus 16
ggguacacuacuagugguu

SEQ ID NO: 11116 - RNA, 19 nt, Rhinovirus 16
guacacuacuagugguuau

SEQ ID NO: 11117 - RNA, 19 nt, Rhinovirus 16
ccagaacaccaguuagcua

SEQ ID NO: 11118 - RNA, 19 nt, Rhinovirus 16
ccaguuagcuacaguaaau

SEQ ID NO: 11119 - RNA, 19 nt, Rhinovirus 16
guuagcuacaguaaauaaa

SEQ ID NO: 11120 - RNA, 19 nt, Rhinovirus 16
gcuacaguaaauaaaggua

SEQ ID NO: 11121 - RNA, 19 nt, Rhinovirus 16
cuacaguaaauaaagguaa

SEQ ID NO: 11122 - RNA, 19 nt, Rhinovirus 16
guaaauaaagguaauguua

SEQ ID NO: 11123 - RNA, 19 nt, Rhinovirus 16
guaauguuaaugcagguua

SEQ ID NO: 11124 - RNA, 19 nt, Rhinovirus 16
ggguacacaaguugaaaau

SEQ ID NO: 11125 - RNA, 19 nt, Rhinovirus 16
gaaacaaccuagugaugau

SEQ ID NO: 11126 - RNA, 19 nt, Rhinovirus 16
gaugauaauuggcuaaauu

SEQ ID NO: 11127 - RNA, 19 nt, Rhinovirus 16
gcuaaauuuugaugguaca

SEQ ID NO: 11128 - RNA, 19 nt, Rhinovirus 16
gguacauuauugggcaauu

SEQ ID NO: 11129 - RNA, 19 nt, Rhinovirus 16
guacauuauugggcaauuu

SEQ ID NO: 11130 - RNA, 19 nt, Rhinovirus 16
ccaauggauucuaugguua

SEQ ID NO: 11131 - RNA, 19 nt, Rhinovirus 16
gauucuaugguuagacaua

SEQ ID NO: 11132 - RNA, 19 nt, Rhinovirus 16
caauuggaguuugguaaua

SEQ ID NO: 11133 - RNA, 19 nt, Rhinovirus 16
gguaauaauaccaguuugu

SEQ ID NO: 11134 - RNA, 19 nt, Rhinovirus 16
caacuacaaagcaacaaua

SEQ ID NO: 11135 - RNA, 19 nt, Rhinovirus 16
cuacaaagcaacaauauau

SEQ ID NO: 11136 - RNA, 19 nt, Rhinovirus 16
gcaacaauauauccaacau

SEQ ID NO: 11137 - RNA, 19 nt, Rhinovirus 16
caacaauauauccaacauu

SEQ ID NO: 11138 - RNA, 19 nt, Rhinovirus 16
gcccaaugugugcugaauu

SEQ ID NO: 11139 - RNA, 19 nt, Rhinovirus 16
cucuggagcacgugccaaa

SEQ ID NO: 11140 - RNA, 19 nt, Rhinovirus 16
gugcaaggucuaccaguau

SEQ ID NO: 11141 - RNA, 19 nt, Rhinovirus 16
gcaaggucuaccaguauau

SEQ ID NO: 11142 - RNA, 19 nt, Rhinovirus 16
gacaacagaugauaugcaa

SEQ ID NO: 11143 - RNA, 19 nt, Rhinovirus 16
ccaacaaaagagaucuuua

SEQ ID NO: 11144 - RNA, 19 nt, Rhinovirus 16
cuuuauaccaggagagguu

SEQ ID NO: 11145 - RNA, 19 nt, Rhinovirus 16
caggagagguuaagaacuu

SEQ ID NO: 11146 - RNA, 19 nt, Rhinovirus 16
guuaagaacuugauugaaa

SEQ ID NO: 11147 - RNA, 19 nt, Rhinovirus 16
gaaaugugucagguggaua

SEQ ID NO: 11148 - RNA, 19 nt, Rhinovirus 16
guggauacacucauaccaa

SEQ ID NO: 11149 - RNA, 19 nt, Rhinovirus 16
ggauacacucauaccaaua

SEQ ID NO: 11150 - RNA, 19 nt, Rhinovirus 16
caaaauuagcugaagaaau

SEQ ID NO: 11151 - RNA, 19 nt, Rhinovirus 16
cugaagaaauuuuugcaau

SEQ ID NO: 11152 - RNA, 19 nt, Rhinovirus 16
gaagaaauuuuugcaauua

SEQ ID NO: 11153 - RNA, 19 nt, Rhinovirus 16
ccacaacccucauugguga

SEQ ID NO: 11154 - RNA, 19 nt, Rhinovirus 16
gagauagcaaguuacuuua

SEQ ID NO: 11155 - RNA, 19 nt, Rhinovirus 16
gcaaguuacuuuacacacu

SEQ ID NO: 11156 - RNA, 19 nt, Rhinovirus 16
ggacagggagccugcgauu

SEQ ID NO: 11157 - RNA, 19 nt, Rhinovirus 16
gcgauucaguuucauguuu

SEQ ID NO: 11158 - RNA, 19 nt, Rhinovirus 16
cugcaaacacuaccuuaaa

SEQ ID NO: 11159 - RNA, 19 nt, Rhinovirus 16
gggauugguaagccuagaa

SEQ ID NO: 11160 - RNA, 19 nt, Rhinovirus 16
gguaagccuagaaguagaa

SEQ ID NO: 11161 - RNA, 19 nt, Rhinovirus 16
gccuagaaguagaaaggaa

SEQ ID NO: 11162 - RNA, 19 nt, Rhinovirus 16
gaaguagaaaggaagcaau

SEQ ID NO: 11163 - RNA, 19 nt, Rhinovirus 16
guagaaaggaagcaauguu

SEQ ID NO: 11164 - RNA, 19 nt, Rhinovirus 16
ggaagcaauguuagggaca

SEQ ID NO: 11165 - RNA, 19 nt, Rhinovirus 16
ggacacacgugguguggga

SEQ ID NO: 11166 - RNA, 19 nt, Rhinovirus 16
ggugugggauguagguuua

SEQ ID NO: 11167 - RNA, 19 nt, Rhinovirus 16
ggauguagguuuacaaucu

SEQ ID NO: 11168 - RNA, 19 nt, Rhinovirus 16
gaucagugccagucaguau

SEQ ID NO: 11169 - RNA, 19 nt, Rhinovirus 16
cuacauuacaugcugguau

SEQ ID NO: 11170 - RNA, 19 nt, Rhinovirus 16
cugcugagauguuguguuu

SEQ ID NO: 11171 - RNA, 19 nt, Rhinovirus 16
gagacacagaccugcacaa

SEQ ID NO: 11172 - RNA, 19 nt, Rhinovirus 16
gcacaagcaaacaggacca

SEQ ID NO: 11173 - RNA, 19 nt, Rhinovirus 16
caagcaaacaggaccaaua

SEQ ID NO: 11174 - RNA, 19 nt, Rhinovirus 16
gcaaacaggaccaauaaca

SEQ ID NO: 11175 - RNA, 19 nt, Rhinovirus 16
ggaaagauauguagaugaa

SEQ ID NO: 11176 - RNA, 19 nt, Rhinovirus 16
agucuuaaaugaaguguua

SEQ ID NO: 11177 - RNA, 19 nt, Rhinovirus 16
ccaauauuaaucagagcca

SEQ ID NO: 11178 - RNA, 19 nt, Rhinovirus 16
gaaacaggacauaccaaua

SEQ ID NO: 11179 - RNA, 19 nt, Rhinovirus 16
ccaauaagauacagccaga

SEQ ID NO: 11180 - RNA, 19 nt, Rhinovirus 16
gccagaagacacuauagaa

SEQ ID NO: 11181 - RNA, 19 nt, Rhinovirus 16
ccagaagacacuauagaaa

SEQ ID NO: 11182 - RNA, 19 nt, Rhinovirus 16
gugcaaucuucacagacau

SEQ ID NO: 11183 - RNA, 19 nt, Rhinovirus 16
ggaugaaaugaguguggaa

SEQ ID NO: 11184 - RNA, 19 nt, Rhinovirus 16
gaugaaaugaguguggaaa

SEQ ID NO: 11185 - RNA, 19 nt, Rhinovirus 16
ggaaagcuuccuaggcaga

SEQ ID NO: 11186 - RNA, 19 nt, Rhinovirus 16
caugaaucaguguuggaua

SEQ ID NO: 11187 - RNA, 19 nt, Rhinovirus 16
ggacaauuacaaugaucaa

SEQ ID NO: 11188 - RNA, 19 nt, Rhinovirus 16
gaucaaaguuucacuaaau

SEQ ID NO: 11189 - RNA, 19 nt, Rhinovirus 16
ggaacauaaaccugcaaga

SEQ ID NO: 11190 - RNA, 19 nt, Rhinovirus 16
gaacauaaaccugcaagaa

SEQ ID NO: 11191 - RNA, 19 nt, Rhinovirus 16
acauaaaccugcaagaaau

SEQ ID NO: 11192 - RNA, 19 nt, Rhinovirus 16
gcaagaaauggcacaaauu

SEQ ID NO: 11193 - RNA, 19 nt, Rhinovirus 16
caagaaauggcacaaauua

SEQ ID NO: 11194 - RNA, 19 nt, Rhinovirus 16
ggcacaaauuagaagaaaa

SEQ ID NO: 11195 - RNA, 19 nt, Rhinovirus 16
gcacaaauuagaagaaaau

SEQ ID NO: 11196 - RNA, 19 nt, Rhinovirus 16
gaagaaaauuugaaauguu

SEQ ID NO: 11197 - RNA, 19 nt, Rhinovirus 16
gcaagauuugacucugaaa

SEQ ID NO: 11198 - RNA, 19 nt, Rhinovirus 16
ggucauauagucaugcaau

SEQ ID NO: 11199 - RNA, 19 nt, Rhinovirus 16
gucauauagucaugcaaua

SEQ ID NO: 11200 - RNA, 19 nt, Rhinovirus 16
cauauagucaugcaauaua

SEQ ID NO: 11201 - RNA, 19 nt, Rhinovirus 16
gcaccuauaccaacaacua

SEQ ID NO: 11202 - RNA, 19 nt, Rhinovirus 16
caacaacuagagaugacua

SEQ ID NO: 11203 - RNA, 19 nt, Rhinovirus 16
gcuuggcaaucuggaacaa

SEQ ID NO: 11204 - RNA, 19 nt, Rhinovirus 16
ggaacaaaugcaucuguau

SEQ ID NO: 11205 - RNA, 19 nt, Rhinovirus 16
gaacaaaugcaucuguauu

SEQ ID NO: 11206 - RNA, 19 nt, Rhinovirus 16
gaguauugcaucagcauau

SEQ ID NO: 11207 - RNA, 19 nt, Rhinovirus 16
cagcauauuacauguuuua

SEQ ID NO: 11208 - RNA, 19 nt, Rhinovirus 16
guuaugauggagacacaua

SEQ ID NO: 11209 - RNA, 19 nt, Rhinovirus 16
ggagacacauauaaaucca

SEQ ID NO: 11210 - RNA, 19 nt, Rhinovirus 16
ccaaugacaugggaacuuu

SEQ ID NO: 11211 - RNA, 19 nt, Rhinovirus 16
ggaacuuuguguucgcgua

SEQ ID NO: 11212 - RNA, 19 nt, Rhinovirus 16
ccagugagcaauuacacaa

SEQ ID NO: 11213 - RNA, 19 nt, Rhinovirus 16
cagugagcaauuacacaaa

SEQ ID NO: 11214 - RNA, 19 nt, Rhinovirus 16
gcaauuacacaaagucaaa

SEQ ID NO: 11215 - RNA, 19 nt, Rhinovirus 16
acacaaagucaaaguggua

SEQ ID NO: 11216 - RNA, 19 nt, Rhinovirus 16
caaagugguaacaaggaua

SEQ ID NO: 11217 - RNA, 19 nt, Rhinovirus 16
ggauauaucacaaagccaa

SEQ ID NO: 11218 - RNA, 19 nt, Rhinovirus 16
gauauaucacaaagccaaa

SEQ ID NO: 11219 - RNA, 19 nt, Rhinovirus 16
gccaaacacaccaaagcuu

SEQ ID NO: 11220 - RNA, 19 nt, Rhinovirus 16
gcuguucaauacucacaua

SEQ ID NO: 11221 - RNA, 19 nt, Rhinovirus 16
caauacucacauacacaua

SEQ ID NO: 11222 - RNA, 19 nt, Rhinovirus 16
cuacaaauugaguucagaa

SEQ ID NO: 11223 - RNA, 19 nt, Rhinovirus 16
caaauugaguucagaagua

SEQ ID NO: 11224 - RNA, 19 nt, Rhinovirus 16
ggcuauaagaccuagaaca

SEQ ID NO: 11225 - RNA, 19 nt, Rhinovirus 16
gcuauaagaccuagaacaa

SEQ ID NO: 11226 - RNA, 19 nt, Rhinovirus 16
cuauaagaccuagaacaaa

SEQ ID NO: 11227 - RNA, 19 nt, Rhinovirus 16
ccuagaacaaaucuaacaa

SEQ ID NO: 11228 - RNA, 19 nt, Rhinovirus 16
guaugugcauguugguaau

SEQ ID NO: 11229 - RNA, 19 nt, Rhinovirus 16
gcauguugguaaucuaaua

SEQ ID NO: 11230 - RNA, 19 nt, Rhinovirus 16
gguaaucuaauauacagaa

SEQ ID NO: 11231 - RNA, 19 nt, Rhinovirus 16
guaaucuaauauacagaaa

SEQ ID NO: 11232 - RNA, 19 nt, Human rotavirus
cgacauggagguucuguac

SEQ ID NO: 11233 - RNA, 19 nt, Human rotavirus
cuuaaagaugcuagggaca

SEQ ID NO: 11234 - RNA, 19 nt, Human rotavirus
agacuggaggaauugguaa

SEQ ID NO: 11235 - RNA, 19 nt, Human rotavirus
ggaggaauugguaauuuac

SEQ ID NO: 11236 - RNA, 19 nt, Human rotavirus
ggucuauuagguacaacac

SEQ ID NO: 11237 - RNA, 19 nt, Human rotavirus
gaacuuggaugcuaauuau

SEQ ID NO: 11238 - RNA, 19 nt, Human rotavirus
gagaaugcaagaacuauaa

SEQ ID NO: 11239 - RNA, 19 nt, Human rotavirus
ggaugaaauggcaagagaa

SEQ ID NO: 11240 - RNA, 19 nt, Human rotavirus
gaugaaauggcaagagaau

SEQ ID NO: 11241 - RNA, 19 nt, Human rotavirus
gaaccauguggcuuaaugc

SEQ ID NO: 11242 - RNA, 19 nt, Human rotavirus
cuuaaugcuggaucagaaa

SEQ ID NO: 11243 - RNA, 19 nt, Human rotavirus
caaguggcuggauuugacu

SEQ ID NO: 11244 - RNA, 19 nt, Human rotavirus
acuacucaugcgccauaaa

SEQ ID NO: 11245 - RNA, 19 nt, Human rotavirus
cuacucaugcgccauaaau

SEQ ID NO: 11246 - RNA, 19 nt, Human rotavirus
cgaacauacagcaauuuga

SEQ ID NO: 11247 - RNA, 19 nt, Human rotavirus
gcuagauuugguacuauca

SEQ ID NO: 11248 - RNA, 19 nt, Human rotavirus
uugaugcguccaccuaaua

SEQ ID NO: 11249 - RNA, 19 nt, Human rotavirus
ugaugcguccaccuaauau

SEQ ID NO: 11250 - RNA, 19 nt, Human rotavirus
gcaacaguuggacuuacau

SEQ ID NO: 11251 - RNA, 19 nt, Human rotavirus
guuggacuuacauuacgua

SEQ ID NO: 11252 - RNA, 19 nt, Human rotavirus
cgcggugcgucaagaauau

SEQ ID NO: 11253 - RNA, 19 nt, Human rotavirus
ggcaugaauuggacugaau

SEQ ID NO: 11254 - RNA, 19 nt, Human rotavirus
gcaugaauuggacugaauu

SEQ ID NO: 11255 - RNA, 19 nt, Human rotavirus
acuaacuauucaccaucua

SEQ ID NO: 11256 - RNA, 19 nt, Human rotavirus
cacgguagcuuccauuaga

SEQ ID NO: 11257 - RNA, 19 nt, Human rotavirus
acgguagcuuccauuagaa

SEQ ID NO: 11258 - RNA, 19 nt, Human rotavirus
ccauuagaagcauguugau

SEQ ID NO: 11259 - RNA, 19 nt, Human rotavirus
caaucuuaguuagcaugua

SEQ ID NO: 11260 - RNA, 19 nt, Human rotavirus
cuucaaguaaggacaugau

SEQ ID NO: 11261 - RNA, 19 nt, Artificial Sequence
  Description of Artificial Sequence: Synthetic oligonucleotide
caagauuugacucugaaau

SEQ ID NO: 11262 - RNA, 19 nt, Artificial Sequence
  Description of Artificial Sequence: Synthetic oligonucleotide
gaagagaagugaaccugua

SEQ ID NO: 11263 - RNA, 19 nt, Artificial Sequence
  Description of Artificial Sequence: Synthetic oligonucleotide
cuaaauauuuugaugguua

SEQ ID NO: 11264 - RNA, 19 nt, Artificial Sequence
  Description of Artificial Sequence: Synthetic oligonucleotide
ccagaaaccuuuuggucua

SEQ ID NO: 11265 - RNA, 19 nt, Artificial Sequence
  Description of Artificial Sequence: Synthetic oligonucleotide
gcaucauggcuuuugauua

SEQ ID NO: 11266 - RNA, 19 nt, Artificial Sequence
  Description of Artificial Sequence: Synthetic oligonucleotide
cucuuuuuucaaaauacaa

SEQ ID NO: 11267 - RNA, 19 nt, Artificial Sequence
  Description of Artificial Sequence: Synthetic oligonucleotide
uuuuucaaaauacaaaggu

SEQ ID NO: 11268 - RNA, 19 nt, Artificial Sequence
  Description of Artificial Sequence: Synthetic oligonucleotide
uucaaaauacaaagguaac

SEQ ID NO: 11269 - RNA, 19 nt, Artificial Sequence
  Description of Artificial Sequence: Synthetic oligonucleotide
gugcaguuggaugugaucc

SEQ ID NO: 11270 - RNA, 19 nt, Artificial Sequence
  Description of Artificial Sequence: Synthetic oligonucleotide
gauuuagauaaacuuaaaa

SEQ ID NO: 11271 - RNA, 19 nt, Artificial Sequence
  Description of Artificial Sequence: Synthetic oligonucleotide
auuuagauaaacuuaaaau

SEQ ID NO: 11272 - RNA, 19 nt, Artificial Sequence
  Description of Artificial Sequence: Synthetic oligonucleotide
gaguccauuagauggacaa

SEQ ID NO: 11273 - RNA, 19 nt, Artificial Sequence
  Description of Artificial Sequence: Synthetic oligonucleotide
aguccauuagauggacaaa

SEQ ID NO: 11274 - RNA, 19 nt, Artificial Sequence
  Description of Artificial Sequence: Synthetic oligonucleotide
gaauguggcuaaccuuaaa

SEQ ID NO: 11275 - RNA, 19 nt, Artificial Sequence
  Description of Artificial Sequence: Synthetic oligonucleotide
gaaugcggcuaaccuuaaa

SEQ ID NO: 11276 - RNA, 19 nt, Artificial Sequence
  Description of Artificial Sequence: Synthetic oligonucleotide
gaauguggcuaauccuaaa

SEQ ID NO: 11277 - RNA, 19 nt, Artificial Sequence
  Description of Artificial Sequence: Synthetic oligonucleotide
cugaauguggcuaaccuua

SEQ ID NO: 11278 - RNA, 19 nt, Artificial Sequence
  Description of Artificial Sequence: Synthetic oligonucleotide
ugaauguggcuaaccuuaa

SEQ ID NO: 11279 - RNA, 19 nt, Artificial Sequence
  Description of Artificial Sequence: Synthetic oligonucleotide
gaccaacuacuuugggugu

SEQ ID NO: 11280 - RNA, 19 nt, Artificial Sequence
  Description of Artificial Sequence: Synthetic oligonucleotide
ggaccaacuacuuugggug

SEQ ID NO: 11281 - RNA, 19 nt, Artificial Sequence
  Description of Artificial Sequence: Synthetic oligonucleotide
gggaccaacuacuuugggu

SEQ ID NO: 11282 - RNA, 19 nt, Artificial Sequence
  Description of Artificial Sequence: Synthetic oligonucleotide
ggguaaugaagcagcaaaa

SEQ ID NO: 11283 - RNA, 19 nt, Artificial Sequence
  Description of Artificial Sequence: Synthetic oligonucleotide
gcagaagcuuuccagaaau

SEQ ID NO: 11284 - RNA, 19 nt, Artificial Sequence
  Description of Artificial Sequence: Synthetic oligonucleotide
gggaaaaaguaaacacuau

SEQ ID NO: 11285 - RNA, 19 nt, Artificial Sequence
  Description of Artificial Sequence: Synthetic oligonucleotide
ggaaaaaguaaacacuaua

SEQ ID NO: 11286 - RNA, 19 nt, Artificial Sequence
  Description of Artificial Sequence: Synthetic oligonucleotide
gcucucagacaaugaggaa

SEQ ID NO: 11287 - RNA, 19 nt, Artificial Sequence
  Description of Artificial Sequence: Synthetic oligonucleotide
gcagaguccucaaucuuaa

SEQ ID NO: 11288 - RNA, 19 nt, Artificial Sequence
  Description of Artificial Sequence: Synthetic oligonucleotide
ggcuagacuagaaucaaua

SEQ ID NO: 11289 - RNA, 19 nt, Artificial Sequence
  Description of Artificial Sequence: Synthetic oligonucleotide
gguauaagagaagaacuaa

SEQ ID NO: 11290 - RNA, 19 nt, Artificial Sequence
  Description of Artificial Sequence: Synthetic oligonucleotide
ggaagaggaaaugaaucaa

SEQ ID NO: 11291 - RNA, 19 nt, Artificial Sequence
  Description of Artificial Sequence: Synthetic oligonucleotide
cgagaaggcaaaagaacuu

SEQ ID NO: 11292 - RNA, 19 nt, Artificial Sequence
  Description of Artificial Sequence: Synthetic oligonucleotide
ggauaacaaucaaggagaa

SEQ ID NO: 11293 - RNA, 19 nt, Artificial Sequence
  Description of Artificial Sequence: Synthetic oligonucleotide
ggacacuuaucaaggcauu

SEQ ID NO: 11294 - RNA, 19 nt, Artificial Sequence
  Description of Artificial Sequence: Synthetic oligonucleotide
cccaaaaaauucgaaguaa

SEQ ID NO: 11295 - RNA, 19 nt, Artificial Sequence
  Description of Artificial Sequence: Synthetic oligonucleotide
ccaaaaaauucgaaguaaa

SEQ ID NO: 11296 - RNA, 19 nt, Artificial Sequence
  Description of Artificial Sequence: Synthetic oligonucleotide
ccauaugggauggugucaa

SEQ ID NO: 11297 - RNA, 19 nt, Artificial Sequence
  Description of Artificial Sequence: Synthetic oligonucleotide
ccaaaucaguuggcaacaa

SEQ ID NO: 11298 - RNA, 19 nt, Artificial Sequence
  Description of Artificial Sequence: Synthetic oligonucleotide
ggaaagugaugauuaucau

SEQ ID NO: 11299 - RNA, 19 nt, Artificial Sequence
  Description of Artificial Sequence: Synthetic oligonucleotide
ggacuaaaggaaaguuauu

SEQ ID NO: 11300 - RNA, 19 nt, Artificial Sequence
  Description of Artificial Sequence: Synthetic oligonucleotide
gcgauagccaaaaccauaa

SEQ ID NO: 11301 - RNA, 19 nt, Artificial Sequence
  Description of Artificial Sequence: Synthetic oligonucleotide
ggcuugagagugaagugaa

SEQ ID NO: 11302 - RNA, 19 nt, Artificial Sequence
  Description of Artificial Sequence: Synthetic oligonucleotide
gcaauuaacaagaacaaau

SEQ ID NO: 11303 - RNA, 19 nt, Artificial Sequence
  Description of Artificial Sequence: Synthetic oligonucleotide
gcugucagcuucagucaau

SEQ ID NO: 11304 - RNA, 19 nt, Artificial Sequence
  Description of Artificial Sequence: Synthetic oligonucleotide
gggauaacaccagcaauau

SEQ ID NO: 11305 - RNA, 19 nt, Artificial Sequence
  Description of Artificial Sequence: Synthetic oligonucleotide
gcaauaucauuggaccuaa

SEQ ID NO: 11306 - RNA, 19 nt, Artificial Sequence
  Description of Artificial Sequence: Synthetic oligonucleotide
ggagaaaaggauuuggaau

SEQ ID NO: 11307 - RNA, 19 nt, Artificial Sequence
  Description of Artificial Sequence: Synthetic oligonucleotide
gcucccucuuguucagaaa

SEQ ID NO: 11308 - RNA, 19 nt, Artificial Sequence
  Description of Artificial Sequence: Synthetic oligonucleotide
ccacuguuuacuacccaaa

SEQ ID NO: 11309 - RNA, 19 nt, Artificial Sequence
  Description of Artificial Sequence: Synthetic oligonucleotide
gcugagcaaucaagagaau

SEQ ID NO: 11310 - RNA, 19 nt, Artificial Sequence
  Description of Artificial Sequence: Synthetic oligonucleotide
gcacaggaagacacccuau

SEQ ID NO: 11311 - RNA, 19 nt, Artificial Sequence
  Description of Artificial Sequence: Synthetic oligonucleotide
gggugaacagcauguaaua

SEQ ID NO: 11312 - RNA, 19 nt, Artificial Sequence
  Description of Artificial Sequence: Synthetic oligonucleotide
ggaaacacuggcuucauua

SEQ ID NO: 11313 - RNA, 19 nt, Artificial Sequence
  Description of Artificial Sequence: Synthetic oligonucleotide
gcaucaucaucauaaucaa

SEQ ID NO: 11314 - RNA, 19 nt, Artificial Sequence
  Description of Artificial Sequence: Synthetic oligonucleotide
cgcauaguuaguuaauuaa

SEQ ID NO: 11315 - RNA, 19 nt, Artificial Sequence
  Description of Artificial Sequence: Synthetic oligonucleotide
gcauaguuaguuaauuaaa

SEQ ID NO: 11316 - RNA, 19 nt, Artificial Sequence
  Description of Artificial Sequence: Synthetic oligonucleotide
cguaaagcuccaugcaaau

SEQ ID NO: 11317 - RNA, 19 nt, Artificial Sequence
  Description of Artificial Sequence: Synthetic oligonucleotide
gcaaauucaaccacaauua

SEQ ID NO: 11318 - RNA, 19 nt, Artificial Sequence
  Description of Artificial Sequence: Synthetic oligonucleotide
gcuauagucuacauaacau

SEQ ID NO: 11319 - RNA, 19 nt, Artificial Sequence
  Description of Artificial Sequence: Synthetic oligonucleotide
gcuacaagaaauagaagua

SEQ ID NO: 11320 - RNA, 19 nt, Artificial Sequence
  Description of Artificial Sequence: Synthetic oligonucleotide
gcacuucacaacuugauau

SEQ ID NO: 11321 - RNA, 19 nt, Artificial Sequence
  Description of Artificial Sequence: Synthetic oligonucleotide
ccuauauggagaugagcaa

SEQ ID NO: 11322 - RNA, 19 nt, Artificial Sequence
  Description of Artificial Sequence: Synthetic oligonucleotide
ccaagagaaaaacugaaaa

SEQ ID NO: 11323 - RNA, 19 nt, Artificial Sequence
  Description of Artificial Sequence: Synthetic oligonucleotide
gcgaaauuaauaauugauu

SEQ ID NO: 11324 - RNA, 19 nt, Artificial Sequence
  Description of Artificial Sequence: Synthetic oligonucleotide
cgaaauuaauaauugauuu

SEQ ID NO: 11325 - RNA, 19 nt, Artificial Sequence
  Description of Artificial Sequence: Synthetic oligonucleotide
gcacuaaucaagugcagua

SEQ ID NO: 11326 - RNA, 19 nt, Artificial Sequence
  Description of Artificial Sequence: Synthetic oligonucleotide
ggacacacaaagaauuaaa

SEQ ID NO: 11327 - RNA, 19 nt, Artificial Sequence
  Description of Artificial Sequence: Synthetic oligonucleotide
gcaaaaucacacaccaaua

SEQ ID NO: 11328 - RNA, 19 nt, Artificial Sequence
  Description of Artificial Sequence: Synthetic oligonucleotide
gcuuacuuaaguuaguaaa

SEQ ID NO: 11329 - RNA, 19 nt, Artificial Sequence
  Description of Artificial Sequence: Synthetic oligonucleotide
gggauaaaugacaaugaaa

SEQ ID NO: 11330 - RNA, 19 nt, Artificial Sequence
  Description of Artificial Sequence: Synthetic oligonucleotide
ggauaaaugacaaugaaaa

SEQ ID NO: 11331 - RNA, 19 nt, Artificial Sequence
  Description of Artificial Sequence: Synthetic oligonucleotide
gguaaauugcuuauugcau

SEQ ID NO: 11332 - RNA, 19 nt, Artificial Sequence
  Description of Artificial Sequence: Synthetic oligonucleotide
cgaaucaaugcacaaauau

SEQ ID NO: 11333 - RNA, 19 nt, Artificial Sequence
  Description of Artificial Sequence: Synthetic oligonucleotide
gggacaaauaacaauggau

SEQ ID NO: 11334 - RNA, 19 nt, Artificial Sequence
  Description of Artificial Sequence: Synthetic oligonucleotide
gcaauuggcucaugccuuu

SEQ ID NO: 11335 - RNA, 19 nt, Artificial Sequence
  Description of Artificial Sequence: Synthetic oligonucleotide
gcagcaugaaauaaugaaa

SEQ ID NO: 11336 - RNA, 19 nt, Artificial Sequence
  Description of Artificial Sequence: Synthetic oligonucleotide
gcucacauuauuaaaacaa

SEQ ID NO: 11337 - RNA, 19 nt, Artificial Sequence
  Description of Artificial Sequence: Synthetic oligonucleotide
ccuaaaauuaaguaugaua

SEQ ID NO: 11338 - RNA, 19 nt, Artificial Sequence
  Description of Artificial Sequence: Synthetic oligonucleotide
gguuuaguaacugguauaa

SEQ ID NO: 11339 - RNA, 19 nt, Artificial Sequence
  Description of Artificial Sequence: Synthetic oligonucleotide
gguauaaucucaauaaauu

SEQ ID NO: 11340 - RNA, 19 nt, Artificial Sequence
  Description of Artificial Sequence: Synthetic oligonucleotide
gguguguaguaaaaagcaa

SEQ ID NO: 11341 - RNA, 19 nt, Artificial Sequence
  Description of Artificial Sequence: Synthetic oligonucleotide
ccaacuguuaacauggaaa

SEQ ID NO: 11342 - RNA, 19 nt, Artificial Sequence
  Description of Artificial Sequence: Synthetic oligonucleotide
ggguaaguaacaaccugaa

SEQ ID NO: 11343 - RNA, 19 nt, Artificial Sequence
  Description of Artificial Sequence: Synthetic oligonucleotide
ggacuaggauuuagaagua

SEQ ID NO: 11344 - RNA, 19 nt, Artificial Sequence
  Description of Artificial Sequence: Synthetic oligonucleotide
gguauguuaacuaauaaau

SEQ ID NO: 11345 - RNA, 19 nt, Artificial Sequence
  Description of Artificial Sequence: Synthetic oligonucleotide
ggagagcuuaacagaacua

SEQ ID NO: 11346 - RNA, 19 nt, Artificial Sequence
  Description of Artificial Sequence: Synthetic oligonucleotide
gcauuuauacuaagaauua

SEQ ID NO: 11347 - RNA, 19 nt, Artificial Sequence
  Description of Artificial Sequence: Synthetic oligonucleotide
gcuaaguguacaagauuuu

SEQ ID NO: 11348 - RNA, 19 nt, Artificial Sequence
  Description of Artificial Sequence: Synthetic oligonucleotide
cgguauauccaaaaaauua

SEQ ID NO: 11349 - RNA, 19 nt, Artificial Sequence
  Description of Artificial Sequence: Synthetic oligonucleotide
gggaaagaaagagaauuaa

SEQ ID NO: 11350 - RNA, 19 nt, Artificial Sequence
  Description of Artificial Sequence: Synthetic oligonucleotide
ccuggcaaacaaagacaaa

SEQ ID NO: 11351 - RNA, 19 nt, Artificial Sequence
  Description of Artificial Sequence: Synthetic oligonucleotide
ggaaaugaaaucagaacuu

SEQ ID NO: 11352 - RNA, 19 nt, Artificial Sequence
  Description of Artificial Sequence: Synthetic oligonucleotide
ggaagaaugauaguuacaa

SEQ ID NO: 11353 - RNA, 19 nt, Artificial Sequence
  Description of Artificial Sequence: Synthetic oligonucleotide
gcaagagccuccauaguaa

SEQ ID NO: 11354 - RNA, 19 nt, Artificial Sequence
  Description of Artificial Sequence: Synthetic oligonucleotide
ccuaaguaaauucaaucaa

SEQ ID NO: 11355 - RNA, 19 nt, Artificial Sequence
  Description of Artificial Sequence: Synthetic oligonucleotide
ccacaaugauaugugcaua

SEQ ID NO: 11356 - RNA, 19 nt, Artificial Sequence
  Description of Artificial Sequence: Synthetic oligonucleotide
ggcuauacagauaccauau

SEQ ID NO: 11357 - RNA, 19 nt, Artificial Sequence
  Description of Artificial Sequence: Synthetic oligonucleotide
ggugaaacauauauaucaa

SEQ ID NO: 11358 - RNA, 19 nt, Artificial Sequence
  Description of Artificial Sequence: Synthetic oligonucleotide
cccauaaaaaagauauuaa

SEQ ID NO: 11359 - RNA, 19 nt, Artificial Sequence
  Description of Artificial Sequence: Synthetic oligonucleotide
ggguaggucccuggauaaa

SEQ ID NO: 11360 - RNA, 19 nt, Artificial Sequence
  Description of Artificial Sequence: Synthetic oligonucleotide
ggagaaaguauacuaguua

SEQ ID NO: 11361 - RNA, 19 nt, Artificial Sequence
  Description of Artificial Sequence: Synthetic oligonucleotide
gcaaucagccauguggauu

SEQ ID NO: 11362 - RNA, 19 nt, Artificial Sequence
  Description of Artificial Sequence: Synthetic oligonucleotide
gccuuauuaucuauagaaa

SEQ ID NO: 11363 - RNA, 19 nt, Artificial Sequence
  Description of Artificial Sequence: Synthetic oligonucleotide
ccuuauuaucuauagaaaa

SEQ ID NO: 11364 - RNA, 19 nt, Artificial Sequence
  Description of Artificial Sequence: Synthetic oligonucleotide
gcuacauuaacaacacuaa

SEQ ID NO: 11365 - RNA, 19 nt, Artificial Sequence
  Description of Artificial Sequence: Synthetic oligonucleotide
gcuaagguaacaagugaua

SEQ ID NO: 11366 - RNA, 19 nt, Artificial Sequence
  Description of Artificial Sequence: Synthetic oligonucleotide
gcuauacacuauagcagaa

SEQ ID NO: 11367 - RNA, 19 nt, Artificial Sequence
  Description of Artificial Sequence: Synthetic oligonucleotide
gguacaaagucuauaacua

SEQ ID NO: 11368 - RNA, 19 nt, Artificial Sequence
  Description of Artificial Sequence: Synthetic oligonucleotide
gcuaucaauggugaagaua

SEQ ID NO: 11369 - RNA, 19 nt, Artificial Sequence
  Description of Artificial Sequence: Synthetic oligonucleotide
ggguuguuaucuaggauau

SEQ ID NO: 11370 - RNA, 19 nt, Artificial Sequence
  Description of Artificial Sequence: Synthetic oligonucleotide
gcgacuaguucucauuuaa

SEQ ID NO: 11371 - RNA, 19 nt, Artificial Sequence
  Description of Artificial Sequence: Synthetic oligonucleotide
cgacuaguucucauuuaaa

SEQ ID NO: 11372 - RNA, 19 nt, Artificial Sequence
  Description of Artificial Sequence: Synthetic oligonucleotide
gguaggaucaagcacucaa

SEQ ID NO: 11373 - RNA, 19 nt, Artificial Sequence
  Description of Artificial Sequence: Synthetic oligonucleotide
gcacucaagagaaaaaauu

SEQ ID NO: 11374 - RNA, 19 nt, Artificial Sequence
  Description of Artificial Sequence: Synthetic oligonucleotide
ccuguuuauaacagacaaa

SEQ ID NO: 11375 - RNA, 19 nt, Artificial Sequence
  Description of Artificial Sequence: Synthetic oligonucleotide
ggcuaagaagauugcucaa

SEQ ID NO: 11376 - RNA, 19 nt, Artificial Sequence
  Description of Artificial Sequence: Synthetic oligonucleotide
gcuaagaagauugcucaau

SEQ ID NO: 11377 - RNA, 19 nt, Artificial Sequence
  Description of Artificial Sequence: Synthetic oligonucleotide
gcauaggaaguuuagguau

SEQ ID NO: 11378 - RNA, 19 nt, Artificial Sequence
  Description of Artificial Sequence: Synthetic oligonucleotide
ccucuauuaccaagauuua

SEQ ID NO: 11379 - RNA, 19 nt, Artificial Sequence
  Description of Artificial Sequence: Synthetic oligonucleotide
ccaagauuuaugaguguaa

SEQ ID NO: 11380 - RNA, 19 nt, Artificial Sequence
  Description of Artificial Sequence: Synthetic oligonucleotide
ccagcuuauaggacaacaa

SEQ ID NO: 11381 - RNA, 19 nt, Artificial Sequence
  Description of Artificial Sequence: Synthetic oligonucleotide
gcuuauaggacaacaaauu

SEQ ID NO: 11382 - RNA, 19 nt, Artificial Sequence
  Description of Artificial Sequence: Synthetic oligonucleotide
ggacaacaaauuaccacuu

SEQ ID NO: 11383 - RNA, 19 nt, Artificial Sequence
  Description of Artificial Sequence: Synthetic oligonucleotide
cccaaaacaauuagucuua

SEQ ID NO: 11384 - RNA, 19 nt, Artificial Sequence
  Description of Artificial Sequence: Synthetic oligonucleotide
ccuccuguauuucaaggaa

SEQ ID NO: 11385 - RNA, 19 nt, Artificial Sequence
  Description of Artificial Sequence: Synthetic oligonucleotide
gggaagaugcuuaugccua

SEQ ID NO: 11386 - RNA, 19 nt, Artificial Sequence
  Description of Artificial Sequence: Synthetic oligonucleotide
gcaugccauugguguggaa

SEQ ID NO: 11387 - RNA, 19 nt, Artificial Sequence
  Description of Artificial Sequence: Synthetic oligonucleotide
ccauugguguggaauauua

SEQ ID NO: 11388 - RNA, 19 nt, Artificial Sequence
  Description of Artificial Sequence: Synthetic oligonucleotide
ccuaucauuaguagguuau

SEQ ID NO: 11389 - RNA, 19 nt, Artificial Sequence
  Description of Artificial Sequence: Synthetic oligonucleotide
gguuauauaggauuuaaaa

SEQ ID NO: 11390 - RNA, 19 nt, Artificial Sequence
  Description of Artificial Sequence: Synthetic oligonucleotide
ggauuuaaaaacugguuua

SEQ ID NO: 11391 - RNA, 19 nt, Artificial Sequence
  Description of Artificial Sequence: Synthetic oligonucleotide
gcaugaaguacccuggauu

SEQ ID NO: 11392 - RNA, 19 nt, Artificial Sequence
  Description of Artificial Sequence: Synthetic oligonucleotide
gggagcuaguugaaauuaa

SEQ ID NO: 11393 - RNA, 19 nt, Artificial Sequence
  Description of Artificial Sequence: Synthetic oligonucleotide
ggagcuaguugaaauuaaa

SEQ ID NO: 11394 - RNA, 19 nt, Artificial Sequence
  Description of Artificial Sequence: Synthetic oligonucleotide
cgauuaauuaggaagaaau

SEQ ID NO: 11395 - RNA, 19 nt, Artificial Sequence
  Description of Artificial Sequence: Synthetic oligonucleotide
ccaguucagacuacaacaa

SEQ ID NO: 11396 - RNA, 19 nt, Artificial Sequence
  Description of Artificial Sequence: Synthetic oligonucleotide
gggaaguuaacaagaaauu

SEQ ID NO: 11397 - RNA, 19 nt, Artificial Sequence
  Description of Artificial Sequence: Synthetic oligonucleotide
ggaaguuaacaagaaauua

SEQ ID NO: 11398 - RNA, 19 nt, Artificial Sequence
  Description of Artificial Sequence: Synthetic oligonucleotide
gcacguaaacagguauaau

SEQ ID NO: 11399 - RNA, 19 nt, Artificial Sequence
  Description of Artificial Sequence: Synthetic oligonucleotide
ggaaauugauaaaggacuu

SEQ ID NO: 11400 - RNA, 19 nt, Artificial Sequence
  Description of Artificial Sequence: Synthetic oligonucleotide
ggacuuaaacccuaagguu

SEQ ID NO: 11401 - RNA, 19 nt, Artificial Sequence
  Description of Artificial Sequence: Synthetic oligonucleotide
cccuaagguucuuuacuuu

SEQ ID NO: 11402 - RNA, 19 nt, Artificial Sequence
  Description of Artificial Sequence: Synthetic oligonucleotide
ccuaagguucuuuacuuua

SEQ ID NO: 11403 - RNA, 19 nt, Artificial Sequence
  Description of Artificial Sequence: Synthetic oligonucleotide
gcagguaacuggauggcaa

SEQ ID NO: 11404 - RNA, 19 nt, Artificial Sequence
  Description of Artificial Sequence: Synthetic oligonucleotide
gguaacuggauggcaagaa

SEQ ID NO: 11405 - RNA, 19 nt, Artificial Sequence
  Description of Artificial Sequence: Synthetic oligonucleotide
ggaugaucuugaucaccau

SEQ ID NO: 11406 - RNA, 19 nt, Artificial Sequence
  Description of Artificial Sequence: Synthetic oligonucleotide
ccacagaugcaacucaaaa

SEQ ID NO: 11407 - RNA, 19 nt, Artificial Sequence
  Description of Artificial Sequence: Synthetic oligonucleotide
gggacuugauacacagaau

SEQ ID NO: 11408 - RNA, 19 nt, Artificial Sequence
  Description of Artificial Sequence: Synthetic oligonucleotide
ggacuugauacacagaaua

SEQ ID NO: 11409 - RNA, 19 nt, Artificial Sequence
  Description of Artificial Sequence: Synthetic oligonucleotide
ggaacagaucuuuacuuau

SEQ ID NO: 11410 - RNA, 19 nt, Artificial Sequence
  Description of Artificial Sequence: Synthetic oligonucleotide
ggacugcaauauaaaguua

SEQ ID NO: 11411 - RNA, 19 nt, Artificial Sequence
  Description of Artificial Sequence: Synthetic oligonucleotide
gccaugucacggagaaaua

SEQ ID NO: 11412 - RNA, 19 nt, Artificial Sequence
  Description of Artificial Sequence: Synthetic oligonucleotide
ccucaaaaaaacuagacaa

SEQ ID NO: 11413 - RNA, 19 nt, Artificial Sequence
  Description of Artificial Sequence: Synthetic oligonucleotide
ggauuaagaauaccaauaa

SEQ ID NO: 11414 - RNA, 19 nt, Artificial Sequence
  Description of Artificial Sequence: Synthetic oligonucleotide
cggaaguaagauuauagaa

SEQ ID NO: 11415 - RNA, 19 nt, Artificial Sequence
  Description of Artificial Sequence: Synthetic oligonucleotide
ggaaguaagauuauagaau

SEQ ID NO: 11416 - RNA, 19 nt, Artificial Sequence
  Description of Artificial Sequence: Synthetic oligonucleotide
gguuagagcauaucuugaa

SEQ ID NO: 11417 - RNA, 19 nt, Artificial Sequence
  Description of Artificial Sequence: Synthetic oligonucleotide
ggugaauuaaacuaugauu

SEQ ID NO: 11418 - RNA, 19 nt, Artificial Sequence
  Description of Artificial Sequence: Synthetic oligonucleotide
cccaauaugaucaagcuua

SEQ ID NO: 11419 - RNA, 19 nt, Artificial Sequence
  Description of Artificial Sequence: Synthetic oligonucleotide
ccaauaugaucaagcuuau

SEQ ID NO: 11420 - RNA, 19 nt, Artificial Sequence
  Description of Artificial Sequence: Synthetic oligonucleotide
ccugggaaaugcagagaua

SEQ ID NO: 11421 - RNA, 19 nt, Artificial Sequence
  Description of Artificial Sequence: Synthetic oligonucleotide
gggaaaugcagagauaaaa

SEQ ID NO: 11422 - RNA, 19 nt, Artificial Sequence
  Description of Artificial Sequence: Synthetic oligonucleotide
ggaaaugcagagauaaaaa

SEQ ID NO: 11423 - RNA, 19 nt, Artificial Sequence
  Description of Artificial Sequence: Synthetic oligonucleotide
gcagagauaaaaaaacuaa

SEQ ID NO: 11424 - DNA, 8 bp, Artificial Sequence
  Description of Artificial Sequence: Synthetic oligonucleotide
aaaaaaaa

SEQ ID NO: 11425 - DNA, 8 bp, Artificial Sequence
  Description of Artificial Sequence: Synthetic oligonucleotide
tttgttat

SEQ ID NO: 11426 - DNA, 216 bp, Human Metapneumovirus
atgtctcttcaagggattcacctaagtgatctatcatataaacatgctatattaaaagagtctcaatacacaataaaaagagatgtaggcaccacaactgcagtgacaccttcatcattacaacaagaaataacacttttgtgtggggaaatactttacactaaacacactgattacaaatatgctgctgagataggaatacaatatatttgcaca

SEQ ID NO: 11427 - DNA, 216 bp, Human Metapneumovirus
atgtctcttcaagggattcacctaagtgatctgtcatataaacatgctatattaaaagagtctcaatacacaataaaaagagatgtaggcaccacaactgcagtgacaccttcatcattgcagcaagagataacacttttgtgtggagagattctttacactaaacatactgattacaaatatgctgcagagatagggatacaatatatttgcacg

SEQ ID NO: 11428 - DNA, 216 bp, Human Metapneumovirus
atgtctcttcaagggattcacctgagtgatctatcatacaagcatgctatattaaaagagtctcagtatacaataaagagagatgtaggcacaacaacagcagtgacaccctcatcattgcaacaagaaataacactattgtgtggagaaattctatatgctaagcatgctgattacaaatatgctgcagaaataggaatacaatatattagcaca

SEQ ID NO: 11429 - DNA, 216 bp, Human Metapneumovirus
atgtctcttcaagggattcacctgagtgatttatcatacaagcatgctatattaaaagagtctcagtacacaataaaaagagatgtgggtacaacaactgcagtgacaccctcatcattgcaacaagaaataacactgttgtgtggagaaattctgtatgctaaacatgctgactacaaatatgctgcagaaataggaatacaatatattagcaca

SEQ ID NO: 11430 - DNA, 216 bp, Artificial Sequence
  Description of Artificial Sequence: Synthetic consensus sequence
atgtctcttcaagggattcacctgagtgatctatcatataagcatgctatattaaaagagtctcagtacacaataaaaagagatgtaggcaccacaactgcagtgacaccttcatcattgcaacaagaaataacacttttgtgtggagaaattctttatgctaaacatgctgattacaaatatgctgcagagataggaatacaatatatttgcaca

SEQ ID NO: 11431 - DNA, 399 bp, Human Respiratory syncytial virus
atggctcttagcaaagtcaagttgaatgatacactcaacaaagatcaacttctgtcatccagcaaatacaccatccaacggagcacaggagatagtattgatactcctaattatgatgtgcagaaacacatcaataagttatgtggcatgttattaatcacagaagatgctaatcataaattcactgggttaataggtatgttatatgctatgtctagattaggaagagaagacaccataaaaatactcagagatgcgggatatcatgtaaaagcaaatggagtggatgtaacaacacatcgtcaagacattaatgggaaagaaatgaaatttgaagtgttaacattgtcaagcttaacaactgaaattcaaatcaacattgagatagaatctagaaaa

SEQ ID NO: 11432 - DNA, 399 bp, Human Respiratory syncytial virus
atggctcttagcaaagtcaagttgaatgatacactcaacaaagatcaacttctgtcatccagcaaatacaccatccaacggagcacaggagatagtattgatactcctaattatgatgtgcagaaacacatcaataagttatgtggcatgttattaatcacagaagatgctaatcataaattcactgggttaataggtatgttatatgcgatgtctaggttaggaagagaagacaccataaaaatactcagagatgcgggatatcatgtaaaagcaaatggagtagatgtaacaacacatcgtcaagacattaatggaaaagaaatgaaatttgaagtgttaacattggcaagcttaacaactgaaattcaaatcaacattgagatagaatctagaaaa

SEQ ID NO: 11433 - DNA, 399 bp, Human Respiratory syncytial virus
atggctcttagcaaagtcaagttaaatgatacattaaataaggatcagctgctgtcatccagcaaatacactattcaacgtagtacaggagataatattgacactcccaattatgatgtgcaaaaacacctaaacaaactatgtggtatgctattaatcactgaagatgcaaatcataaattcacaggattaataggtatgttatatgctatgtccaggttaggaagggaagacactataaagatacttaaagatgctggatatcatgttaaagctaatggagtagatataacaacatatcgtcaagatataaatggaaaggaaatgaaattcgaagtattaacattatcaagcttgacatcagaaatacaagtcaatattgagatagaatctagaaaa

SEQ ID NO: 11434 - DNA, 399 bp, Artificial Sequence
  Description of Artificial Sequence: Synthetic consensus sequence
atggctcttagcaaagtcaagttgaatgatacactcaacaaagatcaacttctgtcatccagcaaatacaccatccaacggagcacaggagatagtattgatactcctaattatgatgtgcagaaacacatcaataagttatgtggcatgttattaatcacagaagatgctaatcataaattcactgggttaataggtatgttatatgctatgtctaggttaggaagagaagacaccataaaaatactcagagatgcgggatatcatgtaaaagcaaatggagtagatgtaacaacacatcgtcaagacattaatggaaaagaaatgaaatttgaagtgttaacattgtcaagcttaacaactgaaattcaaatcaacattgagatagaatctagaaaa

SEQ ID NO: 11435 - DNA, 159 bp, New Castle Disease Virus
agcacagagatttatgatgatagcagggtctctccctcgggcatgcagcaacggtaccccgttcgtcacagctggggttgaagatgatgcaccagaagacattactgataccctggagaggatcctctctatccaggctcaagtatgggtcacggtggc

SEQ ID NO: 11436 - DNA, 159 bp, New Castle Disease Virus; identical to SEQ ID NO: 11435

SEQ ID NO: 11437 - DNA, 159 bp, New Castle Disease Virus
agcacagagatttgcgatgatagcaggatctctccctcgggcatgcagcaacggcaccccgttcgtcacagccggggctgaagatgatgcaccagaagacatcaccgataccctggagaggatcctctctatccaggctcaagtatgggtcacagtagc

SEQ ID NO: 11438 - DNA, 159 bp, New Castle Disease Virus
agcacagagatttatgatgatagcagggtctctccctcgggcatgcagcaacggtaccccgttcgtcacagctggggttgagggtgatgcaccagaagacattactgataccttggagaggatcctttctatccaggctcaagtatgggtcacggtggc

SEQ ID NO: 11439 - DNA, 159 bp, New Castle Disease Virus
agcacagagatttgcgatgatagcaggatctctccctcgggcatgcagcaacggaaccccgttcgtcacagccggggcagaagatgatgcaccagaagacatcaccgataccctggagaggatcctctctatccaggctcaagtatgggtcacagtagc

SEQ ID NO: 11440 - DNA, 159 bp, Artificial Sequence; identical to SEQ ID NO: 11435
  Description of Artificial Sequence: Synthetic consensus sequence

SEQ ID NO: 11441 - DNA, 230 bp, Nipah Virus
atgagtgatatctttgaagaggcggctagttttaggagttatcaatctaagttagggagagatgggagggctagtgcagcaactgctactttgacaaccaagataaggatatttgtaccagctactaatagtccagagctcagatgggaactaacattgtttgcacttgatgtgattagatctccgagtgctgccgagtcaatgaaagttggagctgctttcacactcat

SEQ ID NO: 11442 - DNA, 230 bp, Nipah Virus; identical to SEQ ID NO: 11441

SEQ ID NO: 11443 - DNA, 230 bp, Artificial Sequence; identical to SEQ ID NO: 11441
  Description of Artificial Sequence: Synthetic consensus sequence

SEQ ID NO: 11444 - DNA, 196 bp, Measles Virus
ggcccaaactaacaggggcactaataggtatattatccttatttgtggagtctccaggtcaattgattcagaggatcaccgatgaccctgacgttagcataaggctgttagaggttgtccagagtgaccagtcacaatctggccttaccttcgcatcaagaggtaccaacatggaggatgaggcggaccaatactt

SEQ ID NO: 11445 - DNA, 196 bp, Measles Virus
ggcccaaactaacaggggcactaataggtatattatccttatttgtggagtctccaggtcaattgattcagaggatcaccgatgaccctgacgttagcatcaggctgttagaggttgttcagagtgaccagtcacaatctggccttaccttcgcatcaagaggtaccaacatggaggatgaggcggaccaatactt

SEQ ID NO: 11446 - DNA, 196 bp, Artificial Sequence
  Description of Artificial Sequence: Synthetic consensus sequence
ggcccaaactaacaggggcactaataggtatattatccttatttgtggagtctccaggtcaattgattcagaggatcaccgatgaccctgacgttagcatmaggctgttagaggttgtycagagtgaccagtcacaatctggccttaccttcgcatcaagaggtaccaacatggaggatgaggcggaccaatactt

SEQ ID NO: 11447 - DNA, 204 bp, Mumps Virus
caagacaggggtgaggagggttcaattccaccggagactttaaagtcagcagtcaaagtcttcgttattaacacacccaatcccaccacacgctaccagatgctaaacttttgcctaagaataatctgcagtcagaatgctagggcatcccacagggtaggtgcattgataacattattctcacttccctcagcaggcatgcaa

SEQ ID NO: 11448 - DNA, 204 bp, Mumps Virus
caagacaggggtgaggagggttcaattccaccggagactttaaagtcagcagtcaaagtcttcgttattaacacacccaatcccaccacacgctatcagatgctaaacttttgcttaagaataatctgcagtcaaaatgctagggcatctcacagggtaggtgcattgataacattattctcacttccctcagcaggcatgcaa

SEQ ID NO: 11449 - DNA, 204 bp, Mumps Virus
caagacaggggtgaggagggttcaattccgccggagactttaaagtcagcagtcaaagtcttcgttattaacacacccaatcccaccacacgctaccatatgctaaacttttgcctaaggataatctgcagtcaaaatgctagggcatctcacagggtaggtgcattgataacattattctctcttccctcagcaggcatgcaa

SEQ ID NO: 11450 - DNA, 204 bp, Artificial Sequence
  Description of Artificial Sequence: Synthetic consensus sequence
caagacaggggtgaggagggttcaattccaccggagactttaaagtcagcagtcaaagtcttcgttattaacacacccaatcccaccacacgctaccagatgctaaacttttgcctaagaataatctgcagtcaaaatgctagggcatctcacagggtaggtgcattgataacattattctcacttccctcagcaggcatgcaa

SEQ ID NO: 11451 - DNA, 245 bp, SARS Coronavirus
atgtctgataatggaccccaatcaaaccaacgtagtgccccccgcattacatttggtggacccacagattcaactgacaataaccagaatggaggacgcaatggggcaaggccaaaacagcgccgaccccaaggtttacccaataatactgcgtcttggttcacagctctcactcagcatggcaaggaggaacttagattccctcgaggccagggcgttccaatcaacaccaatagtggtccaga

SEQ ID NO: 11452 - DNA, 245 bp, SARS Coronavirus; identical to SEQ ID NO: 11451

SEQ ID NO: 11453 - DNA, 245 bp, SARS Coronavirus; identical to SEQ ID NO: 11451

SEQ ID NO: 11454 - DNA, 245 bp, Artificial Sequence; identical to SEQ ID NO: 11451
  Description of Artificial Sequence: Synthetic consensus sequence

SEQ ID NO: 11455 - DNA, 208 bp, West Nile Virus
atgtctaagaaaccaggagggcccggcaagagccgggctgtcaatatgctaaaacgcggaatgccccgcgtgttgtccttgattggactgaagagggctatgttgagcctgatcgacggcaaggggccaatacgatttgtgttggctctcttggcgttcttcaggttcacagcaattgctccgacccgagcagtgctggatcgatgga

SEQ ID NO: 11456 - DNA, 208 bp, West Nile Virus
atgtctaagaaaccaggagggcccggcaagagccgggctgtcaatatgctaaaacgcggaatgccccgcgtgttgtccttgattggactgaagagggcaatgttgagcctgattgacggcaaggggccaatacgattcgtgttggctctcttggcgttcttcaggttcacagcaattgctccgacccgagcagtactggaccgatgga

SEQ ID NO: 11457 - DNA, 208 bp, West Nile Virus; identical to SEQ ID NO: 11455

SEQ ID NO: 11458 - DNA, 208 bp, Artificial Sequence; identical to SEQ ID NO: 11455
  Description of Artificial Sequence: Synthetic consensus sequence

SEQ ID NO: 11459 - DNA, 224 bp, Vesicular Stomatitis Virus
atgtctgttacagtcaagagaatcattgacagcacagtcatagttccaaagcttcctgcaaatgaggatccagtggaatacccggcagattacttcagaaaatcaaaagagattcctctttacatcaatacaacgaaaagtttgtcagatctaagaggatatgtctaccaaggcctcaaatccggaaatgtatcaatcatacatgtcaacagctacttgtatgg

SEQ ID NO: 11460 - DNA, 224 bp, Vesicular Stomatitis Virus
atgtctgttacagtcaagagaatcattgacaacacagtcatagttccaaaacttcctgcaaatgaggatccagtggaatacccggcagattacttcagaaaatcaaaggagattcctctttacatcaatactacaaaaagtttgtcagatctaagaggatatgtctaccaaggcctcaaatccggaaatgtatcaatcatacatgtcaacagctacttgtatgg

SEQ ID NO: 11461 - DNA, 224 bp, Artificial Sequence
  Description of Artificial Sequence: Synthetic consensus sequence
atgtctgttacagtcaagagaatcattgacarcacagtcatagttccaaarcttcctgcaaatgaggatccagtggaatacccggcagattacttcagaaaatcaaargagattcctctttacatcaatacwacraaaagtttgtcagatctaagaggatatgtctaccaaggcctcaaatccggaaatgtatcaatcatacatgtcaacagctacttgtatgg

SEQ ID NO: 11462 - DNA, 85 bp, Human Rotavirus
ggctattaaaggttcaatggcgtacaggaaacgtggagcgcgccgtgaggcaaacttaaataataatgatcgaatgcaggagaaa

SEQ ID NO: 11463 - DNA, 102 bp, Human Rotavirus
ggctattaaaggctcaatggcgtacaggaagcgcggagctaaacgtgaagacttatcacaacaacatgagcgtctgcaagaaaaagaaattgaaaataatac

SEQ ID NO: 11464 - DNA, 102 bp, Human Rotavirus
ggctattaaaggctcaatggcgtacaggaagcgcggagctaaacgtgaaaacttaccacaacaaaatgaacgtctgcaagaaaaagaaattgaaaaagatgt

SEQ ID NO: 11465 - DNA, 102 bp, Artificial Sequence
  Description of Artificial Sequence: Synthetic consensus sequence
ggctattaaaggctcaatggcgtacaggaagcgcggagctaaacgtgaagacttatcacaacaaaatgadcgtctgcaagaaaaagaaattgaaaawratry

SEQ ID NO: 11466 - DNA, 102 bp, Human Rotavirus
ggcttttaaacgaagtcttcgacatggaggttctgtattcattgtcaaaaactttgaaagatgctagggataaaatcgttgaaggtacattatactcaaatg

SEQ ID NO: 11467 - DNA, 102 bp, Human Rotavirus
ggctttaaaacgaagtcttcaacatggatgttttgtattcattatcaaaaactcttaaggatgctagagacaaaattgtcgaaggcactttatactctaatg

SEQ ID NO: 11468 - DNA, 102 bp, Human Rotavirus
ggctttaaaacgaagtcttcgacatggaggttctgtactcactgtcaaaaactcttaaagatgctagggacaaaattgttgaaggtacattatattctaatg

SEQ ID NO: 11469 - DNA, 102 bp, Human Rotavirus; identical to SEQ ID NO: 11468

SEQ ID NO: 11470 - DNA, 102 bp, Artificial Sequence
  Description of Artificial Sequence: Synthetic consensus sequence
ggctttaaaacgaagtcttcgacatggaggttctgtattcattgtcaaaaactcttaaagatgctagggacaaaattgttgaaggtacattatattctaatg

SEQ ID NO: 11471 - DNA, 50 bp, Influenza A virus
aatgaaggatcttatttcttcggagacaatgcagaggagtacgacaatta

SEQ ID NO: 11472 - DNA, 50 bp, Influenza A virus; identical to SEQ ID NO: 11471

SEQ ID NO: 11473 - DNA, 50 bp, Influenza A virus; identical to SEQ ID NO: 11471

SEQ ID NO: 11474 - DNA, 50 bp, Influenza A virus; identical to SEQ ID NO: 11471

SEQ ID NO: 11475 - DNA, 50 bp, Influenza A virus; identical to SEQ ID NO: 11471

SEQ ID NO: 11476 - DNA, 50 bp, Influenza A virus
aatgaaggatcttatttcttcggagacaatgcagaggaatatgacaattg

SEQ ID NO: 11477 - DNA, 50 bp, Influenza A virus
aacgagggatcttatttcttcggagacaatgcagaggaatatgacaatta

SEQ ID NO: 11478 - DNA, 50 bp, Influenza A virus
aatgaagggtcttatttcttcggagacaatgctgaggagtttgacagtta

SEQ ID NO: 11479 - DNA, 50 bp, Influenza A virus
aatgagggatcttatttcttcggagacaatgctgaggagtatgacaattg

SEQ ID NO: 11480 - DNA, 50 bp, Influenza A virus
aatgaaggatcttatttcttcggagacaatgcataggagtatgacaatta

SEQ ID NO: 11481 - DNA, 50 bp, Influenza A virus
aacgaagggtcttatttcttcggagacaatgcagaggaatatgacaatta

SEQ ID NO: 11482 - DNA, 19 bp, Artificial Sequence
  Description of Artificial Sequence: Synthetic oligonucleotide
cgggactctagcatactta

SEQ ID NO: 11483 - DNA, 19 bp, Artificial Sequence
  Description of Artificial Sequence: Synthetic oligonucleotide
actgacagccagacagcga

SEQ ID NO: 11484 - DNA, 19 bp, Artificial Sequence
  Description of Artificial Sequence: Synthetic oligonucleotide
agacagcgaccaaaagaat

SEQ ID NO: 11485 - DNA, 19 bp, Artificial Sequence
  Description of Artificial Sequence: Synthetic oligonucleotide
atgaagatctgttccacca

SEQ ID NO: 11486 - DNA, 19 bp, Artificial Sequence
  Description of Artificial Sequence: Synthetic oligonucleotide
gatctgttccaccattgaa

SEQ ID NO: 11487 - DNA, 19 bp, Artificial Sequence
  Description of Artificial Sequence: Synthetic oligonucleotide
gcaattgaggagtgcctga

SEQ ID NO: 11488 - DNA, 19 bp, Artificial Sequence
  Description of Artificial Sequence: Synthetic oligonucleotide
ttgaggagtgcctgattaa

SEQ ID NO: 11489 - DNA, 19 bp, Artificial Sequence
  Description of Artificial Sequence: Synthetic oligonucleotide
ggatcttatttcttcggag

SEQ ID NO: 11490 - DNA, 19 bp, Artificial Sequence
  Description of Artificial Sequence: Synthetic oligonucleotide
gatcttatttcttcggaga

SEQ ID NO: 11491 - DNA, 19 bp, Artificial Sequence
  Description of Artificial Sequence: Synthetic oligonucleotide
acctatgactggactctaa

SEQ ID NO: 11492 - DNA, 22 bp, Artificial Sequence
  Description of Artificial Sequence: Synthetic oligonucleotide
  This sequence may encompass 15-22 adenine bases
aaaaaaaaaaaaaaaaaaaaaa

1. An RNAi-inducing entity targeted to a conserved sequence of a transcript from a respiratory virus, wherein said RNAi-inducing entity is between about 15 and about 60 nucleotides in length and comprises:
(a) a first nucleic acid sequence that is at least about 84% identical to a portion of a nucleic acid encoding a viral protein; and
(b) a second nucleic acid sequence that is complementary to the first nucleic acid portion;
and wherein the respiratory virus is selected from the group consisting of influenza virus, human respiratory syncytial virus, human metapneumovirus, human parainfluenza virus, and human rhinovirus.

2. The RNAi-inducing entity of claim 1, wherein the first nucleic acid sequence of the RNAi-inducing entity is at least about 89% identical to a portion of a nucleic acid encoding a viral protein .

3. The RNAi-inducing entity of claim 1, wherein the first nucleic acid sequence of the RNAi-inducing entity is at least about 94% identical to a portion of a nucleic acid encoding a viral protein.

4. The RNAi-inducing entity of claim 1, wherein said RNAi-inducing entity is an siRNA or an shRNA.

5. The RNAi-inducing entity of claim 1, wherein said nucleic acid comprises a 3′ overhang.

6. The RNAi-inducing entity of claim 5, wherein said 3′ overhang comprises deoxythymidine.

7-16. (canceled)

17. The RNAi-inducing entity of claim 1, wherein RNAi-inducing entity is between about 20 and about 30 nucleotides in length.

18. The RNAi-inducing entity of claim 1, wherein the transcript from the respiratory virus is selected from a nucleoprotein (NP) PB1, PB2, PA, M, or NS transcript.

19. The RNAi-inducing entity of claim 1, wherein said RNAi-inducing entity is selected from SEQ ID NOS:1-10,709; 10,710-10,751; 10,823-10,881; 10,885-10,986; 11-282-11,423; 10,987-11,036; 11,037-11,044; 11,045-11,071; 11,072-11,086; 11,087-11,231; or 11,233-11,260.

20-25. (canceled)

26. An siRNA that reduces the expression of a first gene encoding a first viral protein and a second gene encoding a second viral protein.

27. The siRNA of claim 26, wherein said first and second viral genes are from different strains of the same virus.

28. The siRNA of claim 26, wherein said first and second viral genes are from two different viruses.

29. The siRNA of claim 28, wherein one virus is an influenza virus.

30. The siRNA of claim 26, wherein the siRNA reduces the expression of two or more genes encoding viral proteins by at least about 25%.

31-35. (canceled)

36. A composition comprising one or more siRNA, each of which reduces the expression of a gene encoding a viral protein.

37. The composition of claim 36, wherein a first siRNA reduces the expression of a first gene encoding a first viral protein and a second siRNA reduces the expression of a second gene encoding a second viral protein.

38. The composition of claim 37, wherein said first and second siRNAs reduce the expression of at said first and second genes by at least about 25%.

39. The composition of claim 37, wherein said first and second genes are from two strains of the same viral species.

40. The composition of claim 37, wherein said first and second genes are from two species of the same viral genus.

41. The composition of claim 37, wherein said first and second genes are from two viruses of the same viral family.

42. (canceled)

43. The composition of claim 36, further comprising a cationic polymer.

44. (canceled)

45. A method of reducing expression of a target viral gene in a virally-infected mammalian cell, comprising the step of contacting said cell with an siRNA that reduces expression of a viral protein gene, such that said siRNA enters the cytoplasm of said mammalian cell and reduces the expression of said viral protein gene by at least about 25%.

46. The method of claim 45, wherein said viral protein is obtained from a virus selected from the group consisting of human respiratory syncytial virus, human metapneumovirus, human parainfluenza virus 1, human parainfluenza virus 2, human parainfluenza virus 3, human parainfluenza virus 4a, human parainfluenza virus 4b, rhinovirus and influenza virus.

47. The method of claim 45, wherein said viral protein gene is a respiratory virus protein gene.

48. The method of claim 45, wherein said viral protein gene is an influenza virus protein gene.

49.-56. (canceled)

57. A method of preventing or treating a viral infection in a subject comprising administering a therapeutic compound comprising an RNAi-inducing entity according to claim 1.

58-60. (canceled)

61. The method of claim 57, wherein the transcript from the respiratory virus is selected from a nucleoprotein (NP) PB1, PB2, PA, M, or NS transcript.

62. The method of claim 57, wherein the the RNAi-inducing entity is selected from SEQ ID NOS:1-10,709; 10,710-10,751; 10,823-10,881; 10,885-10,986; 11-282-11,423; 10,987-11,036; 11,037-11,044; 11,045-11,071; 11,072-11,086; 11,087-11,231; or 11,233-11,260.

63. The method of claim 57, wherein the RNAi-inducing entity is formulated with a cationic polymer.

64-81. (canceled)
